United States Patent Application Publication US 2024/0376449 A1 - sequence listing, part 2

SEQ ID NO: 1225 - DNA, 2670 bp, synthetic construct
  misc_feature 1..2670: note = Variant of RNA polymerase
  source 1..2670: mol_type = other DNA
atgcaccatcaccatcaccatatgaacacgattaacattgctaagaacgacttctctgacatcgaactggctgctatcccgttcaacactctggctgaccattacggtgagcgtttagctcgtgaacagttggcccttgagcatgagtcttacgagatgggtgaagcacgcttccgcaagatgtttgagcgtcaacttaaagctggtgaggttgcggataacgctgccgccaagcctctcatcactaccctactccctaagatgattgcacgcatcaacgactggtttgaggaagtgaaagctaagcgcggcaagcgcccgacagccttccagttcctgcaagaaatcaagccggaagccgtagcgtacatcaccattaagaccactctggcttgcctaacccgcgaagacaatacaaccgttcaggctgtagcaagcgcaatcggtcgggccattgaggacgaggctcgcttcggtcgtatccgtgaccttgaagctaagcacttcaagaagaacgttgaggaacaactcaacaagaaggtagggcacgtcgcgaagaaagcatttatgcaagttgtcgagcacgacatgctctctaagggtctactcggtggcgaggcgtggtcttcgtggcataaggaagactctattcatgtaggagtacgctgcatcgagatgctcattgagtcaaccggaatggttagcttacaccgccaaaatgctggcgtagtgggtgcagactctgagactatcgaactcgcacctgaatacgctgaggctatcgcaacccgtgcaggtgcgctggctggcatctctccgatgttccaaccttgcgtagttcctcctaagccgtggactggcattactggtggtggctattgggctgcggggcgcaaacccctgcagttagtacgtactcgcagtctggcggcgcttcgccgctatgaagaagtgtcgatgccggaggtcatcaaagcagtcaacattgcgcagaatacagcatggcgtattaacaagaaagttctcgacgtagcgaataccatcacccaatggcagcactgtccagtcgcggatgtgcctgcgatggatcgtggcgaaatgccagctcgtccgttggacatcgataccaacgagattgcacttaaagcgtggaagaaagaagcttccgcgttctaccgcaaagacaaagcacgcatgagccgtcgtctgtcgatggagtttatgttatctcaggcgaacaagtttggcaattatgaggctatctggtttccgcaaaacatggattggcgtgggcgcgtgtacgctgtcccgatgttcaatcctcagggcaacgatatgacgaaaggcctgctgacctttgcgcaggagaaacccattggtgaagacggcttctattggctcaagattcatggcgcaaatacagctggagtggataaagtaccgtttccacaacgcatcaaatttgttgaggataaccatacgaatattatggaatgcgcgaaagcaccgctggaaaacacttggtgggcggaacaggactcgccgttctgctttctggcgttctgctttgagtatgctggcgtcatcaatagtggtctgtcgtacaactgtagcttgcctctggcatttgatggtagttgctccggcctgcaacatttctcagcgatgttacgcgacgaaattggcggcaaagctgtgaatctcctcccatctgcggaataccaggatatttatcgtatcgtcagcgacaaagttaacgagatgctgaaacaagatctgattaacggtacctctaccaccgtggaaacggtgactgataaaaagacaggcgaaattacccaacgcacgaaatacgggaccaaagttatggcacagtggtggttagaacacggtgtgaatcgtggcgtcacgaaacgcccggttatgactttggtgtatgggagcaaagagtttggattccgcgatcaagtgctgagtgacaccattcaaccggcgatcgataacggcaagggtgacatgtttctgaatccgaatcaggctgctggttacatggcgaaactgatctggaacgcagtgtccgggaccgtagtcgcagcagttgaggcgatgaactggctgaaaagtgcggcgaaattacttgctgctgaagtgaaggatgagaagacggatacagttctgcgtggccgctgcgcagtacattgggtgactcccgacggcttccctgtgtggcaggaatacaagaagcctattcaaacgcgcttgaacctgatgttcctcggtcagttccgcttacagcctaccattaacaccaacaaagatagcgagattgatgcacgcaaacaggtgtctggtatcgctcctaactttgtacacagcctggacggtaaccaccttcgtatgactgtagtgtgggcacacgagaagtacggaatcgaatcttttgcactgattcacgactccttcggtaccattccggctgacgctgcgaacctgcgcaaagcagtgcgcgaaactttcgttgacacatatgagtcttgtgatgtactggctgatttctacgaccagattgctgaccagttgcacgagtctcaacgcgacaaaatgccagcacttccggctaaaggtaagttgaacctccgtgacatcttaaaatcggacttcgcgttcgcg

SEQ ID NO: 1226 - protein, 890 aa, synthetic construct
  REGION 1..890: note = Variant of RNA polymerase
MHHHHHHMNTINIAKNDFSDIELAAIPFNTLADHYGERLAREQLALEHESYEMGEARFRKMFERQLKAGEVADNAAAKPLITTLLPKMIARINDWFEEVKAKRGKRPTAFQFLQEIKPEAVAYITIKTTLACLTREDNTTVQAVASAIGRAIEDEARFGRIRDLEAKHFKKNVEEQLNKKVGHVAKKAFMQVVEHDMLSKGLLGGEAWSSWHKEDSIHVGVRCIEMLIESTGMVSLHRQNAGVVGADSETIELAPEYAEAIATRAGALAGISPMFQPCVVPPKPWTGITGGGYWAAGRKPLQLVRTRSLAALRRYEEVSMPEVIKAVNIAQNTAWRINKKVLDVANTITQWQHCPVADVPAMDRGEMPARPLDIDTNEIALKAWKKEASAFYRKDKARMSRRLSMEFMLSQANKFGNYEAIWFPQNMDWRGRVYAVPMFNPQGNDMTKGLLTFAQEKPIGEDGFYWLKIHGANTAGVDKVPFPQRIKFVEDNHTNIMECAKAPLENTWWAEQDSPFCFLAFCFEYAGVINSGLSYNCSLPLAFDGSCSGLQHFSAMLRDEIGGKAVNLLPSAEYQDIYRIVSDKVNEMLKQDLINGTSTTVETVTDKKTGEITQRTKYGTKVMAQWWLEHGVNRGVTKRPVMTLVYGSKEFGFRDQVLSDTIQPAIDNGKGDMFLNPNQAAGYMAKLIWNAVSGTVVAAVEAMNWLKSAAKLLAAEVKDEKTDTVLRGRCAVHWVTPDGFPVWQEYKKPIQTRLNLMFLGQFRLQPTINTNKDSEIDARKQVSGIAPNFVHSLDGNHLRMTVVWAHEKYGIESFALIHDSFGTIPADAANLRKAVRETFVDTYESCDVLADFYDQIADQLHESQRDKMPALPAKGKLNLRDILKSDFAFA

SEQ ID NO: 1227 - DNA, 2670 bp, synthetic construct
  misc_feature 1..2670: note = Variant of RNA polymerase
  source 1..2670: mol_type = other DNA
atgcaccatcaccatcaccatatgaacacgattaacattgctaagaacgacttctctgacatcgaactggctgctatcccgttcaacactctggctgaccattacggtgagcgtttagctagtgaacagttggcccttgagcatgagtcttacgagatgggtgaagcacgcttccgcgagatgtttgagcgtcaacttaaagctggtgaggttgcggataacgctgccgccaagcctctcatcactaccctactccctaagatgattgcacgcatcaacgactggtttgaggaagtgaaagctaagcgcggcaagcgcccgacagccttccagttcctgcaagaaatcaagccggaagccgtagcgtacatcaccattaagaccactctggcttgcctaacccgcgaagacaatacaaccgttcaggctgtagcaagcgcaatcggtcgggccattgaggacgaggctcgcttcggtcgtatccgtgaccttgaagctaagcacttcaagaagaacgttgaggaacaactcaacaagaaggtagggcacgtcgcgaagaaagcatttatgcaagttgtcgagcacgacatgctctctaagggtctactcggtggcgaggcgtggtcttcgtggcataaggaagactctattcatgtaggagtacgctgcatcgagatgctcattgagtcaaccggaatggttagcttacaccgccaaaatgctggcgtagtgggtgcagactctgagactatcgaactcgcacctgaatacgctgaggctatcgcaacccgtgcaggtgcgctggctggcatctctccgatgttccaaccttgcgtagttcctcctaagccgtggactggcattactggtggtggctattgggctgcggggcgcaaacccctgcagttagtacgtactcgcagtctggcggcgcttcgccgctatgaagaagtgtcgatgccggaggtcatcaaagcagtcaacattgcgcagaatacagcatggcgtattaacaagaaagttctcgacgtagcgaataccatcacccaatggcagcactgtccagtcgcggatgtgcctgcgatggatcgtggcgaaatgccagctcgtccgttggacatcgataccaacgagattgcacttaaagcgtggaagaaagaagcttccgcgttctaccgcaaagacaaagcacgcatgagccgtcgtctgtcgatggagtttatgttatctcaggcgaacaagtttggcaattatgaggttatctggtttccgcaaaacatggattggcgtgggcgcgtgtacgctgtcccgatgttcaatcctcagggcaacgatatgacgaaaggcctgctgacctttgcgcaggagaaacccattggtgaagacggcttctattggctcaagattcatggcgcaaatacagctggagtggataaagtaccgtttccacaacgcatcaaatttgttgaggataaccatacgaacgttatggaatgtgcgaaagcaccgctggaaaacacttggtgggcggaacaggactcgccgttctgctttctggcgttctgctttgagtatgctggcgtcatcaatagtggtctgtcgtacaactgtagcttgcctctggcatttgatggtagttgctccggcctgcaacatttctcagcgatgttacgcgacgaaattggcggcaaagctgtgaatctcctcccatctgcggaataccaggatatttatcgtatcgtcagcgacaaagttaacgagatgctgaaacaagatctgattaacggtacctctaccaccgtggaaacggtgactgataaaaagacaggcgaaattacccaacgcacgaaatacgggaccaaagttatggcacagtggtggttagaacacggtgtgaatcgtggcgtcacgaaacgcccggttatgactttggtgtatgggagcaaagagtttggattccgcgatcaagtgctgagtgacaccattcaaccggcgatcgataacggcaagggtgacatgtttctgaatccgaatcaggctgctggttacatggcgaaactgatctggaacgcagtgtccgggaccgtagtcgcagcagttgaggcgatgaactggctgaaaagtgcggcgaaattacttgctgctgaagtgaaggatgagaagacggatacagttctgcgtggccgctgcgcagtacattgggtgactcccgacggcttccctgtgtggcaggaatacaagaagcctattcaaacgcgcttgaacctgatgttcctcggtcagttccgcttacagcctaccattaacaccaacaaagatagcgagattgatgcacgcaaacaggtgtctggtatcgctcctaactttgtacacagcctggacggtaaccaccttcgtatgactgtagtgtgggcacacgagaagtacggaatcgaatcttttgcactgattcacgactccttcggtaccattccggctgacgctgcgaacctgcgcaaagcagtgcgcgaaactttcgttgacacatatgagtcttgtgatgtactggctgatttctacgaccagattgttgaccagttgcacgagtctcaacgcgacaaaatgccagcacttccggctaaaggtaagttgaacctccgtgacatcttaaaatcggacttcgcgttcgcg

SEQ ID NO: 1228 - protein, 890 aa, synthetic construct
  REGION 1..890: note = Variant of RNA polymerase
MHHHHHHMNTINIAKNDFSDIELAAIPFNTLADHYGERLASEQLALEHESYEMGEARFREMFERQLKAGEVADNAAAKPLITTLLPKMIARINDWFEEVKAKRGKRPTAFQFLQEIKPEAVAYITIKTTLACLTREDNTTVQAVASAIGRAIEDEARFGRIRDLEAKHFKKNVEEQLNKKVGHVAKKAFMQVVEHDMLSKGLLGGEAWSSWHKEDSIHVGVRCIEMLIESTGMVSLHRQNAGVVGADSETIELAPEYAEAIATRAGALAGISPMFQPCVVPPKPWTGITGGGYWAAGRKPLQLVRTRSLAALRRYEEVSMPEVIKAVNIAQNTAWRINKKVLDVANTITQWQHCPVADVPAMDRGEMPARPLDIDTNEIALKAWKKEASAFYRKDKARMSRRLSMEFMLSQANKFGNYEVIWFPQNMDWRGRVYAVPMFNPQGNDMTKGLLTFAQEKPIGEDGFYWLKIHGANTAGVDKVPFPQRIKFVEDNHTNVMECAKAPLENTWWAEQDSPFCFLAFCFEYAGVINSGLSYNCSLPLAFDGSCSGLQHFSAMLRDEIGGKAVNLLPSAEYQDIYRIVSDKVNEMLKQDLINGTSTTVETVTDKKTGEITQRTKYGTKVMAQWWLEHGVNRGVTKRPVMTLVYGSKEFGFRDQVLSDTIQPAIDNGKGDMFLNPNQAAGYMAKLIWNAVSGTVVAAVEAMNWLKSAAKLLAAEVKDEKTDTVLRGRCAVHWVTPDGFPVWQEYKKPIQTRLNLMFLGQFRLQPTINTNKDSEIDARKQVSGIAPNFVHSLDGNHLRMTVVWAHEKYGIESFALIHDSFGTIPADAANLRKAVRETFVDTYESCDVLADFYDQIVDQLHESQRDKMPALPAKGKLNLRDILKSDFAFA

SEQ ID NO: 1229 - DNA, 2670 bp, synthetic construct
  misc_feature 1..2670: note = Variant of RNA polymerase
  source 1..2670: mol_type = other DNA
atgcaccatcaccatcaccatatgaacacgattaacattgctaagaacgacttctctgacatcgaactggctgctatcccgttcaacactctggctgaccattacggtgagcgtttagctagtgaacagttggcccttgagcatgagtcttacgagatgggtgaagcacgcttccgcaagatgtttgagcgtcaacttaaagctggtgaggttgcggataacgctgccgccaagcctctcatcactaccctactccctaagatgattgcacgcatcaacgactggtttgaggaagtgaaagctaagcgcggcaagcgcccgacagccttccagttcctgcaagaaatcaagccggaagccgtagcgtacatcaccattaagaccactctggcttgcctaacccgcgaagacaatacaaccgttcaggctgtagcaagcgcaatcggtcgggccattgaggacgaggctcgcttcggtcgtatccgtgaccttgaagctaagcacttcaagaagaacgttgaggaacaactcaacaagcgtgtagggcacgtcgcgaagaaagcatttatgcaagttgtcgagcacgacatgctctctaagggtctactcggtggcgaggcgtggtcttcgtggcataaggaagactctattcatgtaggagtacgctgcatcgagatgctcattgagtcaaccggaatggttagcttacaccgccaaaatgctggcgtagtgggtgcagactctgagactatcgaactcgcacctgaatacgctgaggctatcgcaacccgtgcaggtgcgctggctggcatctctccgatgttccaaccttgcgtagttcctcctaagccgtggactggcattactggtggtggctattgggctgcggggcgcaaacccctgcagttagtacgtactcgcagtctggcggcgcttcgccgctatgaagaagtgtcgatgccggaggtcatcaaagcagtcaacattgcgcagaatacagcatggcgtattaacaagaaagttctcgacgtagcgaataccatcacccaatggcagcactgtccagtcgcggatgtgcctgcgatggatcgtggcgaaatgccagctcgtccgttggacatcgataccaacgagattgcacttaaagcgtggaagaaagaagcttccgcgttctaccgcaaagacaaagcacgcatgagccgtcgtctgtcgatggagtttatgttatctcaggcgaacaagtttgccaattatgaggctatctggtttccgcaaaacatggattggcgtgggcgcgtgtacgctgtcccgatgttcaatcctcagggcaacgatatgacgaaaggcctgctgacctttgcgcaggagaaacccattggtgaagacggcttctattggctcaagattcatggcgcaaatacagctggaggggataaagtaccgtttccacaacgcatcaaatttgttgaggataaccatacgaatattatggaatgcgcgaaagcaccgctggaaaacacttggtgggcggaacaggactcgccgttctgctttctggcgttctgctttgagtatgctggcgtcatcaatagtggtctgtcgtacaactgtagcttgcctctggcatttgatggtagttgctccggcctgcaacatttctcagcgatgttacgcgacgaaattggcggcaaagctgtgaatctcctcccatctgcggaataccaggatatttatcgtatcgtcagcgacaaagttaacgagatgctgaaacaagatctgattaacggtacctctaccaccgtggaaacggtgactgataaaaagacaggcgaaattacccaacgcacgaaatacgggaccaaagttatggcacagtggtggttagaacacggtgtgaatcgtggcgtcacgaaacgcccggttatgactttggtgtatgggagcaaagagtttggattccgcgatcaagtgctgagtgacaccattcaaccggcgatcgataacggcaagggtgacatgtttctgaatccgaatcaggctgctggttacatggcgaaactgatctggaacgcagtgtccgggaccgtagtcgcagcagttgaggcgatgaactggctgaaaagtgcggcgaaattacttgctgctgaagtgaaggatgagaagacggatacagttctgcgtggccgctgcgcagtacattgggtgactcccgacggcttccctgtgtggcaggaatacaagaagcctattcaaacgcgcttgaacctgatgttcctcggtcagttccgcttacagcctaccattaacaccaacaaagatagcgagattgatgcacgcaaacaggtgtctggtatcgctcctaactttgtacacagcctggacggtaaccaccttcgtatgactgtagtgtgggcacacgagaagtacggaatcgaatcttttgcactgattcacgactccttcggtaccattccggctgacgctgcgaacctgtttaaagcagtgcgcgaaactttcgttgacacatatgagtcttgtgatgtactggctgatttctacgaccagattgctgaccagttgcacgagtctcaacgcgacaaaatgccagcacttccggctaaaggtaagttgaacctccgtgacatcttaaaatcggacttcgcgttcgcg

SEQ ID NO: 1230 - protein, 890 aa, synthetic construct
  REGION 1..890: note = Variant of RNA polymerase
MHHHHHHMNTINIAKNDFSDIELAAIPFNTLADHYGERLASEQLALEHESYEMGEARFRKMFERQLKAGEVADNAAAKPLITTLLPKMIARINDWFEEVKAKRGKRPTAFQFLQEIKPEAVAYITIKTTLACLTREDNTTVQAVASAIGRAIEDEARFGRIRDLEAKHFKKNVEEQLNKRVGHVAKKAFMQVVEHDMLSKGLLGGEAWSSWHKEDSIHVGVRCIEMLIESTGMVSLHRQNAGVVGADSETIELAPEYAEAIATRAGALAGISPMFQPCVVPPKPWTGITGGGYWAAGRKPLQLVRTRSLAALRRYEEVSMPEVIKAVNIAQNTAWRINKKVLDVANTITQWQHCPVADVPAMDRGEMPARPLDIDTNEIALKAWKKEASAFYRKDKARMSRRLSMEFMLSQANKFANYEAIWFPQNMDWRGRVYAVPMFNPQGNDMTKGLLTFAQEKPIGEDGFYWLKIHGANTAGGDKVPFPQRIKFVEDNHTNIMECAKAPLENTWWAEQDSPFCFLAFCFEYAGVINSGLSYNCSLPLAFDGSCSGLQHFSAMLRDEIGGKAVNLLPSAEYQDIYRIVSDKVNEMLKQDLINGTSTTVETVTDKKTGEITQRTKYGTKVMAQWWLEHGVNRGVTKRPVMTLVYGSKEFGFRDQVLSDTIQPAIDNGKGDMFLNPNQAAGYMAKLIWNAVSGTVVAAVEAMNWLKSAAKLLAAEVKDEKTDTVLRGRCAVHWVTPDGFPVWQEYKKPIQTRLNLMFLGQFRLQPTINTNKDSEIDARKQVSGIAPNFVHSLDGNHLRMTVVWAHEKYGIESFALIHDSFGTIPADAANLFKAVRETFVDTYESCDVLADFYDQIADQLHESQRDKMPALPAKGKLNLRDILKSDFAFA

SEQ ID NO: 1231 - DNA, 2670 bp, synthetic construct
  misc_feature 1..2670: note = Variant of RNA polymerase
  source 1..2670: mol_type = other DNA
atgcaccatcaccatcaccatatgaacacgattaacattgctaagaacgacttctctgacatcgaactggctgctatcccgttcaacactctggctgaccattacggtgagcgtttagctagtgaacagttggcccttgagcatgagtcttacgagatgggtgaagcacgcttccgcaagatgtttgagcgtcaacttaaagctggtgaggttgcggataacgctgccgccaagcctctcatcactaccctactccctaagatgattgcacgcatcaacgactggtttgaggaagtgaaagctaagcgcggcaagcgcccgacagccttccagttcctgcaagaaatcaagccggaagccgtagcgtacatcaccattaagaccactctggcttgcctaacccgcgcagacaatacaaccgttcaggctgtagcaagcgcaatcggtcgggccattgaggacgaggctcgcttcggtcgtatccgtgaccttgaagctaagcacttcaagaagaacgttgaggaacaactcaacaagggggtagggcacgtctacaagaaagcatttatgcaagttgtcgagcacgacatgctctctaagggtctactcggtggcgaggcgtggtcttcgtggcataaggaagactctattcatgtaggagtacgctgcatcgagatgctcattgagtcaaccggaatggttagcttacaccgccaaaatgctggcgtagtgggtgcagactctgagactatcgaactcgcacctgaatacgctgaggctatcgcaacccgtgcaggtgcgctggctggcatctctccgatgttccaaccttgcgtagttcctcctaagccgtggactggcattactggtggtggctattgggctgcggggcgcaaacccctgcagttagtacgtactcgcagtctggcggcgcttcgccgctatgaagaagtgtcgatgccggaggtcatcaaagcagtcaacattgcgcagaatacagcatggcgtattaacaagaaagttctcgacgtagcgaataccatcacccaatggcagcactgtccagtcgcggatgtgcctgcgatggatcgtggcgaaatgccagctcgtccgttggacatcgataccaacgagattgcacttaaagcgtggaagaaagaagcttccgcgttctaccgcaaagacaaagcacgcatgagccgtcgtctgtcgatggagtttatgttatctcaggcgaacaagtttgccaattatgaggctatctggtttccgcaaaacatggattggcgtgggcgcgtgtacgctgtcccgatgttcaatcctcagggcaacgatatgacgaaaggcctgctgacctttgcgcaggagaaacccattggtgaagacggcttctattggctcaagattcatggcgcaaatacagctggaggggataaagtaccgtttccacaacgcatcaaatttgttgaggataaccatacgaatattatggaatgcgcgaaagcaccgctggaaaacacttggtgggcggaacaggactcgccgttctgctttctggcgttctgctttgagtatgctggcgtcatcaatagtggtctgtcgtacaactgtagcttgcctctggcatttgatggtagttgctccggcctgcaacatttctcagcgatgttacgcgacgaaattggcggcaaagctgtgaatctcctcccatctgcggaataccaggatatttatcgtatcgtcagcgacaaagttaacgagatgctgaaacaagatctgattaacggtacctctaccaccgtggaaacggtgactgataaaaagacaggcgaaattacccaacgcacgaaatacgggaccaaagttatggcacagtggtggttagaacacggtgtgaatcgtggcgtcacgaaacgcccggttatgactttggtgtatgggagcaaagagtttggattccgcgatcaagtgctgagtgacaccattcaaccggcgatcgataacggcaagggtgacatgtttctgaatccgaatcaggctgctggttacatggcgaaactgatctggaacgcagtgtccgggaccgtagtcgcagcagttgaggcgatgaactggctgaaaagtgcggcgaaattacttgctgctgaagtgaaggatgagaagacggatacagttctgcgtggccgctgcgcagtacattgggtgactcccgacggcttccctgtgtggcaggaatacaagaagcctattcaaacgcgcttgaacctgatgttcctcggtcagttccgcttacagcctaccattaacaccaacaaagatagcgagattgatgcacgcaaacaggtgtctggtatcgctcctaactttgtacacagcctggacggtaaccaccttcgtatgactgtagtgtgggcacacgagaagtacggaatcgaatcttttgcactgattcacgactccttcggtaccattccggctgacgctgcgaacctgtttaaagcagtgcgcgaaactttcgttgacacatatgagtcttgtgatgtactggctgatttctacgaccagattgctgaccagttgcacgagtctcaacgcgacaaaatgccagcacttccggctaaaggtaagttgaacctccgtgacatcttaaaatcggacttcgcgttcgcg

SEQ ID NO: 1232 - protein, 890 aa, synthetic construct
  REGION 1..890: note = Variant of RNA polymerase
MHHHHHHMNTINIAKNDFSDIELAAIPFNTLADHYGERLASEQLALEHESYEMGEARFRKMFERQLKAGEVADNAAAKPLITTLLPKMIARINDWFEEVKAKRGKRPTAFQFLQEIKPEAVAYITIKTTLACLTRADNTTVQAVASAIGRAIEDEARFGRIRDLEAKHFKKNVEEQLNKGVGHVYKKAFMQVVEHDMLSKGLLGGEAWSSWHKEDSIHVGVRCIEMLIESTGMVSLHRQNAGVVGADSETIELAPEYAEAIATRAGALAGISPMFQPCVVPPKPWTGITGGGYWAAGRKPLQLVRTRSLAALRRYEEVSMPEVIKAVNIAQNTAWRINKKVLDVANTITQWQHCPVADVPAMDRGEMPARPLDIDTNEIALKAWKKEASAFYRKDKARMSRRLSMEFMLSQANKFANYEAIWFPQNMDWRGRVYAVPMFNPQGNDMTKGLLTFAQEKPIGEDGFYWLKIHGANTAGGDKVPFPQRIKFVEDNHTNIMECAKAPLENTWWAEQDSPFCFLAFCFEYAGVINSGLSYNCSLPLAFDGSCSGLQHFSAMLRDEIGGKAVNLLPSAEYQDIYRIVSDKVNEMLKQDLINGTSTTVETVTDKKTGEITQRTKYGTKVMAQWWLEHGVNRGVTKRPVMTLVYGSKEFGFRDQVLSDTIQPAIDNGKGDMFLNPNQAAGYMAKLIWNAVSGTVVAAVEAMNWLKSAAKLLAAEVKDEKTDTVLRGRCAVHWVTPDGFPVWQEYKKPIQTRLNLMFLGQFRLQPTINTNKDSEIDARKQVSGIAPNFVHSLDGNHLRMTVVWAHEKYGIESFALIHDSFGTIPADAANLFKAVRETFVDTYESCDVLADFYDQIADQLHESQRDKMPALPAKGKLNLRDILKSDFAFA

SEQ ID NO: 1233 - DNA, 2670 bp, synthetic construct
  misc_feature 1..2670: note = Variant of RNA polymerase
  source 1..2670: mol_type = other DNA
atgcaccatcaccatcaccatatgaacacgattaacattgctaagaacgacttctctgacatcgaactggctgctatcccgttcaacactctggctgaccattacggtgagcgtttagctagtgaacagttggcccttgagcatgagtcttacgagatgggtgaagcacgcttccgcaagatgtttgagcgtcaacttaaagctggtgaggttgcggataacgctgccgccaagcctctcatcactaccctactccctaagatgattgcacgcatcaacgactggtttgaggaagtgaaagctaagcgcggcaagcgcccgacagccttccagttcctgcaagaaatcaagccggaagccgtagcgtacatcaccattaagaccactctggcttgcctaaccagtgcggacaatacaaccgttcaggctgtagcaagcgcaatcggtcgggccattgaggacgaggctcgcttcggtcgtatccgtgaccttgaagctaagcacttcaagaagaacgttgaggaacaactcaacaagaaggtagggcacgtcgcgaagaaagcatttatgcaagttgtcgagcacgacatgctctctaagggtctactcggtggcgaggcgtggtcttcgtggcataaggaagactctattcatgtaggagtacgctgcatcgagatgctcattgagtcaaccggaatggttagcttacaccgccaaaatgctggcgtagtgggtgcagactctgagactatcgaactcgcacctgaatacgctgaggctatcgcaacccgtgcaggtgcgctggctggcatctctccgatgttccaaccttgcgtagttcctcctaagccgtggactggcattactggtggtggctattgggctgcggggcgcaaacccctgcagttagtacgtactcgcagtctggcggcgcttcgccgctatgaagaagtgtcgatgccggaggtcatcaaagcagtcaacattgcgcagaatacagcatggcgtattaacaagaaagttctcgacgtagcgaataccatcacccaatggcagcactgtccagtcgcggatgtgcctgcgatggatcgtggcgaaatgccagctcgtccgttggacatcgataccaacgagattgcacttaaagcgtggaagaaagaagcttccgcgttctaccgcaaagacaaagcacgcatgagccgtcgtctgtcgatggagtttatgttatctcaggcgaacaagtttggcaattatgaggttatctggtttccgcaaaacatggattggcgtgggcgcgtgtacgctgtcccgatgttcaatcctcagggcaacgatatgacgaaaggcctgctgacctttgcgcaggagaaacccattggtgaagacggcttctattggctcaagattcatggcgcaaatacagctggagtggataaagtaccgtttccgcaacgcatcaaatttgttgaggataaccatacgaatattatggaatgcgcgaaagcaccgctggaaaacacttggtgggcggaacaggactcgccgttctgctttctggcgttctgctttgagtatgctggcgtcatcaatagtggtctgtcgtacaactgtagcttgcctctggcatttgatggtagttgctccggcctgcaacatttctcagcgatgttacgcgacgaaattggcggcaaagctgtgaatctcctcccatctgcggaataccaggatatttatcgtatcgtcagcgacaaagttaacgagatgctgaaacaagatctgattaacggtacctctaccaccgtggaaacggtgactgataaaaagacaggcgaaattacccaacgcacgaaatacgggaccaaagttatggcacagtggtggttagaacacggtgtgaatcgtggcgtcacgaaacgcccggttatgactttggtgtatgggagcaaagagtttggattccgcgatcaagtgctgagtgacaccattcaaccggcgatcgataacggcaagggtgacatgtttctgaatccgaatcaggctgctggttacatggcgaaactgatctggaacgcagtgtccgggaccgtagtcgcagcagttgaggcgatgaactggctgaaaagtgcggcgaaattacttgctgctgaagtgaaggatgagaagacggatacagttctgcgtggccgctgcgcagtacattgggtgactcccgacggcttccctgtgtggcaggaatacaagaagcctattcaaacgcgcttgaacctgatgttcctcggtcagttccgcttacagcctaccattaacaccaacaaagatagcgagattgatgcacgcaaacaggtgtctggtatcgctcctaactttgtacacagcctggacggtaaccaccttcgtatgactgtagtgtgggcacacgagaagtacggaatcgaatcttttgcactgattcacgactccttcggtaccattccggctgacgctgcgaacctgcgcaaagcagtgcgcgaaactttcgttgacacatatgagtcttgtgatgtactggctgatttctacgaccagattgctgaccagttgcacgagtctcaacgcgacaaaatgccagcacttccggctaaaggtaagttgaacctccgtgacatcttaaaatcggacttcgcgttcgcg

SEQ ID NO: 1234 - protein, 890 aa, synthetic construct
  REGION 1..890: note = Variant of RNA polymerase
MHHHHHHMNTINIAKNDFSDIELAAIPFNTLADHYGERLASEQLALEHESYEMGEARFRKMFERQLKAGEVADNAAAKPLITTLLPKMIARINDWFEEVKAKRGKRPTAFQFLQEIKPEAVAYITIKTTLACLTSADNTTVQAVASAIGRAIEDEARFGRIRDLEAKHFKKNVEEQLNKKVGHVAKKAFMQVVEHDMLSKGLLGGEAWSSWHKEDSIHVGVRCIEMLIESTGMVSLHRQNAGVVGADSETIELAPEYAEAIATRAGALAGISPMFQPCVVPPKPWTGITGGGYWAAGRKPLQLVRTRSLAALRRYEEVSMPEVIKAVNIAQNTAWRINKKVLDVANTITQWQHCPVADVPAMDRGEMPARPLDIDTNEIALKAWKKEASAFYRKDKARMSRRLSMEFMLSQANKFGNYEVIWFPQNMDWRGRVYAVPMFNPQGNDMTKGLLTFAQEKPIGEDGFYWLKIHGANTAGVDKVPFPQRIKFVEDNHTNIMECAKAPLENTWWAEQDSPFCFLAFCFEYAGVINSGLSYNCSLPLAFDGSCSGLQHFSAMLRDEIGGKAVNLLPSAEYQDIYRIVSDKVNEMLKQDLINGTSTTVETVTDKKTGEITQRTKYGTKVMAQWWLEHGVNRGVTKRPVMTLVYGSKEFGFRDQVLSDTIQPAIDNGKGDMFLNPNQAAGYMAKLIWNAVSGTVVAAVEAMNWLKSAAKLLAAEVKDEKTDTVLRGRCAVHWVTPDGFPVWQEYKKPIQTRLNLMFLGQFRLQPTINTNKDSEIDARKQVSGIAPNFVHSLDGNHLRMTVVWAHEKYGIESFALIHDSFGTIPADAANLRKAVRETFVDTYESCDVLADFYDQIADQLHESQRDKMPALPAKGKLNLRDILKSDFAFA

SEQ ID NO: 1235 - DNA, 2670 bp, synthetic construct
  misc_feature 1..2670: note = Variant of RNA polymerase
  source 1..2670: mol_type = other DNA
atgcaccatcaccatcaccatatgaacacgattaacattgctaagaacgacttctctgacatcgaactggctgctatcccgttcaacactctggctgaccattacggtgagcgtttagctcgtgaacagttggcccttgagcatgagtcttacgagatgggtgaagcacgcttccgcgagatgtttgagcgtcaacttaaagctggtgaggttgcggataacgctgccgccaagcctctcatcactaccctactccctaagatgattgcacgcatcaacgactggtttgaggaagtgaaagctaagcgcggcaagcgcccgacagccttccagttcctgcaagaaatcaagccggaagccgtagcgtacatcaccattaagaccactctggcttgcctaaccagtgcggacaatacaaccgttcaggctgtagcaagcgcaatcggtcgggccattgaggacgaggctcgcttcggtcgtatccgtgaccttgaagctaagcacttcaagaagaacgttgaggaacaactcaacaagcgcgtagggcacgtcgcgaagaaagcatttatgcaagttgtcgagcacgacatgctctctaagggtctactcggtggcgaggcgtggtcttcgtggcataaggaagactctattcatgtaggagtacgctgcatcgagatgctcattgagtcaaccggaatggttagcttacaccgccaaaatgctggcgtagtgggtgcagactctgagactatcgaactcgcacctgaatacgctgaggctatcgcaacccgtgcaggtgcgctggctggcatctctccgatgttccaaccttgcgtagttcctcctaagccgtggactggcattactggtggtggctattgggctgcggggcgcaaacccctgcagttagtacgtactcgcagtctggcggcgcttcgccgctatgaagaagtgtcgatgccggaggtcatcaaagcagtcaacattgcgcagaatacagcatggcgtattaacaagaaagttctcgacgtagcgaataccatcacccaatggcagcactgtccagtcgcggatgtgcctgcgatggatcgtggcgaaatgccagctcgtccgttggacatcgataccaacgagattgcacttaaagcgtggaagaaagaagcttccgcgttctaccgcaaagacaaagcacgcatgagccgtcgtctgtcgatggagtttatgttatctcaggcgaacaagtttgcgaattatgaggcaatctggtttccgcaaaacatggattggcgtgggcgcgtgtacgctgtcccgatgttcaatcctcagggcaacgatatgacgaaaggcctgctgacctttgcgcaggagaaacccattggtgaagacggcttctattggctcaagattcatggcgcaaatacagctggaggggataaagtaccgtttccacaacgcatcaaatttgttgaggataaccatacgaatattatggaatgcgcgaaagcaccgctggaaaacacttggtgggcggaacaggactcgccgttctgctttctggcgttctgctttgagtatgctggcgtcatcaatagtggtctgtcgtacaactgtagcttgcctctggcatttgatggtagttgctccggcctgcaacatttctcagcgatgttacgcgacgaaattggcggcaaagctgtgaatctcctcccatctgcggaataccaggatatttatcgtatcgtcagcgacaaagttaacgagatgctgaaacaagatctgattaacggtacctctaccaccgtggaaacggtgactgataaaaagacaggcgaaattacccaacgcacgaaatacgggaccaaagttatggcacagtggtggttagaacacggtgtgaatcgtggcgtcacgaaacgcccggttatgactttggtgtatgggagcaaagagtttggattccgcgatcaagtgctgagtgacaccattcaaccggcgatcgataacggcaagggtgacatgtttctgaatccgaatcaggctgctggttacatggcgaaactgatctggaacgcagtgtccgggaccgtagtcgcagcagttgaggcgatgaactggctgaaaagtgcggcgaaattacttgctgctgaagtgaaggatgagaagacggatacagttctgcgtggccgctgcgcagtacattgggtgactcccgacggcttccctgtgtggcaggaatacaagaagcctattcaaacgcgcttgaacctgatgttcctcggtcagttccgcttacagcctaccattaacaccaacaaagatagcgagattgatgcacgcaaacaggtgtctggtatcgctcctaactttgtacacagcctggacggtaaccaccttcgtatgactgtagtgtgggcacacgagaagtacggaatcgaatcttttgcactgattcacgactccttcggtaccattccggctgacgctgcgaacctgtttaaagcagtgcgcgaaactttcgttgacacatatgagtcttgtgatgtactggctgatttctacgaccagattgttgaccagttgcacgagtctcaacgcgacaaaatgccagcacttccggctaaaggtaagttgaacctccgtgacatcttaaaatcggacttcgcgttcgcg

SEQ ID NO: 1236 - protein, 890 aa, synthetic construct
  REGION 1..890: note = Variant of RNA polymerase
MHHHHHHMNTINIAKNDFSDIELAAIPFNTLADHYGERLAREQLALEHESYEMGEARFREMFERQLKAGEVADNAAAKPLITTLLPKMIARINDWFEEVKAKRGKRPTAFQFLQEIKPEAVAYITIKTTLACLTSADNTTVQAVASAIGRAIEDEARFGRIRDLEAKHFKKNVEEQLNKRVGHVAKKAFMQVVEHDMLSKGLLGGEAWSSWHKEDSIHVGVRCIEMLIESTGMVSLHRQNAGVVGADSETIELAPEYAEAIATRAGALAGISPMFQPCVVPPKPWTGITGGGYWAAGRKPLQLVRTRSLAALRRYEEVSMPEVIKAVNIAQNTAWRINKKVLDVANTITQWQHCPVADVPAMDRGEMPARPLDIDTNEIALKAWKKEASAFYRKDKARMSRRLSMEFMLSQANKFANYEAIWFPQNMDWRGRVYAVPMFNPQGNDMTKGLLTFAQEKPIGEDGFYWLKIHGANTAGGDKVPFPQRIKFVEDNHTNIMECAKAPLENTWWAEQDSPFCFLAFCFEYAGVINSGLSYNCSLPLAFDGSCSGLQHFSAMLRDEIGGKAVNLLPSAEYQDIYRIVSDKVNEMLKQDLINGTSTTVETVTDKKTGEITQRTKYGTKVMAQWWLEHGVNRGVTKRPVMTLVYGSKEFGFRDQVLSDTIQPAIDNGKGDMFLNPNQAAGYMAKLIWNAVSGTVVAAVEAMNWLKSAAKLLAAEVKDEKTDTVLRGRCAVHWVTPDGFPVWQEYKKPIQTRLNLMFLGQFRLQPTINTNKDSEIDARKQVSGIAPNFVHSLDGNHLRMTVVWAHEKYGIESFALIHDSFGTIPADAANLFKAVRETFVDTYESCDVLADFYDQIVDQLHESQRDKMPALPAKGKLNLRDILKSDFAFA

SEQ ID NO: 1237 - DNA, 2670 bp, synthetic construct
  misc_feature 1..2670: note = Variant of RNA polymerase
  source 1..2670: mol_type = other DNA
atgcaccatcaccatcaccatatgaacacgattaacattgctaagaacgacttctctgacatcgaactggctgctatcccgttcaacactctggctgaccattacggtgagcgtttagctagtgaacagttggcccttgagcatgagtcttacgagatgggtgaagcacgcttccgcaagatgtttgagcgtcaacttaaagctggtgaggttgcggataacgctgccgccaagcctctcatcactaccctactccctaagatgattgcacgcatcaacgactggtttgaggaagtgaaagctaagcgcggcaagcgcccgacagccttccagttcctgcaagaaatcaagccggaagccgtagcgtacatcaccattaagaccactctggcttgcctaaccagcgcagacaatacaaccgttcaggctgtagcaagcgcaatcggtcgggccattgaggacgaggctcgcttcggtcgtatccgtgaccttgaagctaagcacttcaagaagaacgttgaggaacaactcaacaagcgtgtagggcacgtctacaagaaagcatttatgcaagttgtcgagcacgacatgctctctaagggtctactcggtggcgaggcgtggtcttcgtggcataaggaagactctattcatgtaggagtacgctgcatcgagatgctcattgagtcaaccggaatggttagcttacaccgccaaaatgctggcgtagtgggtgcagactctgagactatcgaactcgcacctgaatacgctgaggctatcgcaacccgtgcaggtgcgctggctggcatctctccgatgttccaaccttgcgtagttcctcctaagccgtggactggcattactggtggtggctattgggctgcggggcgcaaacccctgcagttagtacgtactcgcagtctggcggcgcttcgccgctatgaagaagtgtcgatgccggaggtcatcaaagcagtcaacattgcgcagaatacagcatggcgtattaacaagaaagttctcgacgtagcgaataccatcacccaatggcagcactgtccagtcgcggatgtgcctgcgatggatcgtggcgaaatgccagctcgtccgttggacatcgataccaacgagattgcacttaaagcgtggaagaaagaagcttccgcgttctaccgcaaagacaaagcacgcatgagccgtcgtctgtcgatggagtttatgttatctcaggcgaacaagtttgcgaattatgaggctatctggtttccgcaaaacatggattggcgtgggcgcgtgtacgctgtcccgatgttcaatcctcagggcaacgatatgacgaaaggcctgctgacctttgcgcaggagaaacccattggtgaagacggcttctattggctcaagattcatggcgcaaatacagctggagtggataaagtaccgtttccgcaacgcatcaaatttgttgaggataaccatacgaatattatggaatgcgcgaaagcaccgctggaaaacacttggtgggcggaacaggactcgccgttctgctttctggcgttctgctttgagtatgctggcgtcatcaatagtggtctgtcgtacaactgtagcttgcctctggcatttgatggtagttgctccggcctgcaacatttctcagcgatgttacgcgacgaaattggcggcaaagctgtgaatctcctcccatctgcggaataccaggatatttatcgtatcgtcagcgacaaagttaacgagatgctgaaacaagatctgattaacggtacctctaccaccgtggaaacggtgactgataaaaagacaggcgaaattacccaacgcacgaaatacgggaccaaagttatggcacagtggtggttagaacacggtgtgaatcgtggcgtcacgaaacgcccggttatgactttggtgtatgggagcaaagagtttggattccgcgatcaagtgctgagtgacaccattcaaccggcgatcgataacggcaagggtgacatgtttctgaatccgaatcaggctgctggttacatggcgaaactgatctggaacgcagtgtccgggaccgtagtcgcagcagttgaggcgatgaactggctgaaaagtgcggcgaaattacttgctgctgaagtgaaggatgagaagacggatacagttctgcgtggccgctgcgcagtacattgggtgactcccgacggcttccctgtgtggcaggaatacaagaagcctattcaaacgcgcttgaacctgatgttcctcggtcagttccgcttacagcctaccattaacaccaacaaagatagcgagattgatgcacgcaaacaggtgtctggtatcgctcctaactttgtacacagcctggacggtaaccaccttcgtatgactgtagtgtgggcacacgagaagtacggaatcgaatcttttgcactgattcacgactccttcggtaccattccggctgacgctgcgaacctgcgcaaagcagtgcgcgaaactttcgttgacacatatgagtcttgtgatgtactggctgatttctacgaccagattgctgaccagttgcacgagtctcaacgcgacaaaatgccagcacttccggctaaaggtaagttgaacctccgtgacatcttaaaatcggacttcgcgttcgcg

SEQ ID NO: 1238 - protein, 890 aa, synthetic construct
  REGION 1..890: note = Variant of RNA polymerase
MHHHHHHMNTINIAKNDFSDIELAAIPFNTLADHYGERLASEQLALEHESYEMGEARFRKMFERQLKAGEVADNAAAKPLITTLLPKMIARINDWFEEVKAKRGKRPTAFQFLQEIKPEAVAYITIKTTLACLTSADNTTVQAVASAIGRAIEDEARFGRIRDLEAKHFKKNVEEQLNKRVGHVYKKAFMQVVEHDMLSKGLLGGEAWSSWHKEDSIHVGVRCIEMLIESTGMVSLHRQNAGVVGADSETIELAPEYAEAIATRAGALAGISPMFQPCVVPPKPWTGITGGGYWAAGRKPLQLVRTRSLAALRRYEEVSMPEVIKAVNIAQNTAWRINKKVLDVANTITQWQHCPVADVPAMDRGEMPARPLDIDTNEIALKAWKKEASAFYRKDKARMSRRLSMEFMLSQANKFANYEAIWFPQNMDWRGRVYAVPMFNPQGNDMTKGLLTFAQEKPIGEDGFYWLKIHGANTAGVDKVPFPQRIKFVEDNHTNIMECAKAPLENTWWAEQDSPFCFLAFCFEYAGVINSGLSYNCSLPLAFDGSCSGLQHFSAMLRDEIGGKAVNLLPSAEYQDIYRIVSDKVNEMLKQDLINGTSTTVETVTDKKTGEITQRTKYGTKVMAQWWLEHGVNRGVTKRPVMTLVYGSKEFGFRDQVLSDTIQPAIDNGKGDMFLNPNQAAGYMAKLIWNAVSGTVVAAVEAMNWLKSAAKLLAAEVKDEKTDTVLRGRCAVHWVTPDGFPVWQEYKKPIQTRLNLMFLGQFRLQPTINTNKDSEIDARKQVSGIAPNFVHSLDGNHLRMTVVWAHEKYGIESFALIHDSFGTIPADAANLRKAVRETFVDTYESCDVLADFYDQIADQLHESQRDKMPALPAKGKLNLRDILKSDFAFA

SEQ ID NO: 1239 - DNA, 2670 bp, synthetic construct
  misc_feature 1..2670: note = Variant of RNA polymerase
  source 1..2670: mol_type = other DNA
atgcaccatcaccatcaccatatgaacacgattaacattgctaagaacgacttctctgacatcgaactggctgctatcccgttcaacactctggctgaccattacggtgagcgtttagctagtgaacagttggcccttgagcatgagtcttacgagatgggtgaagcacgcttccgcaagatgtttgagcgtcaacttaaagctggtgaggttgcggataacgctgccgccaagcctctcatcactaccctactccctaagatgattgcacgcatcaacgactggtttgaggaagtgaaagctaagcgcggcaagcgcccgacagccttccagttcctgcaagaaatcaagccggaagccgtagcgtacatcaccattaagaccactctggcttgcctaaccagtgcggacaatacaaccgttcaggctgtagcaagcgcaatcggtcgggccattgaggacgaggctcgcttcggtcgtatccgtgaccttgaagctaagcacttcaagaagaacgttgaggaacaactcaacaaggaggtagggcacgtcgcgaagaaagcatttatgcaagttgtcgagcacgacatgctctctaagggtctactcggtggcgaggcgtggtcttcgtggcataaggaagactctattcatgtaggagtacgctgcatcgagatgctcattgagtcaaccggaatggttagcttacaccgccaaaatgctggcgtagtgggtgcagactctgagactatcgaactcgcacctgaatacgctgaggctatcgcaacccgtgcaggtgcgctggctggcatctctccgatgttccaaccttgcgtagttcctcctaagccgtggactggcattactggtggtggctattgggctgcggggcgcaaacccctgcagttagtacgtactcgcagtctggcggcgcttcgccgctatgaagaagtgtcgatgccggaggtcatcaaagcagtcaacattgcgcagaatacagcatggcgtattaacaagaaagttctcgacgtagcgaataccatcacccaatggcagcactgtccagtcgcggatgtgcctgcgatggatcgtggcgaaatgccagctcgtccgttggacatcgataccaacgagattgcacttaaagcgtggaagaaagaagcttccgcgttctaccgcaaagacaaagcacgcatgagccgtcgtctgtcgatggagtttatgttatctcaggcgaacaagtttgccaattatgaggctatctggtttccgcaaaacatggattggcgtgggcgcgtgtacgctgtcccgatgttcaatcctcagggcaacgatatgacgaaaggcctgctgacctttgcgcaggagaaacccattggtgaagacggcttctattggctcaagattcatggcgcaaatacagctggaggggataaagtaccgtttcagcaacgcatcaaatttgttgaggataaccatacgaatattatggaatgcgcgaaagcaccgctggaaaacacttggtgggcggaacaggactcgccgttctgctttctggcgttctgctttgagtatgctggcgtcatcaatagtggtctgtcgtacaactgtagcttgcctctggcatttgatggtagttgctccggcctgcaacatttctcagcgatgttacgcgacgaaattggcggcaaagctgtgaatctcctcccatctgcggaataccaggatatttatcgtatcgtcagcgacaaagttaacgagatgctgaaacaagatctgattaacggtacctctaccaccgtggaaacggtgactgataaaaagacaggcgaaattacccaacgcacgaaatacgggaccaaagttatggcacagtggtggttagaacacggtgtgaatcgtggcgtcacgaaacgcccggttatgactttggtgtatgggagcaaagagtttggattccgcgatcaagtgctgagtgacaccattcaaccggcgatcgataacggcaagggtgacatgtttctgaatccgaatcaggctgctggttacatggcgaaactgatctggaacgcagtgtccgggaccgtagtcgcagcagttgaggcgatgaactggctgaaaagtgcggcgaaattacttgctgctgaagtgaaggatgagaagacggatacagttctgcgtggccgctgcgcagtacattgggtgactcccgacggcttccctgtgtggcaggaatacaagaagcctattcaaacgcgcttgaacctgatgttcctcggtcagttccgcttacagcctaccattaacaccaacaaagatagcgagattgatgcacgcaaacaggtgtctggtatcgctcctaactttgtacacagcctgaacggtaaccaccttcgtatgactgtagtgtgggcacacgagaagtacggaatcgaatcttttgcactgattcacgactccttcggtaccattccggctgacgctgcgaacctgtttaaagcagtgcgcgaaactttcgttgacacatatgagtcttgtgatgtactggctgatttctacgaccagattgttgaccagttgcacgagtctcaacgcgacaaaatgccagcacttccggctaaaggtaagttgaacctccgtgacatcttaaaatcggacttcgcgttcgcg

SEQ ID NO: 1240 - protein, 890 aa, synthetic construct
  REGION 1..890: note = Variant of RNA polymerase
MHHHHHHMNTINIAKNDFSDIELAAIPFNTLADHYGERLASEQLALEHESYEMGEARFRKMFERQLKAGEVADNAAAKPLITTLLPKMIARINDWFEEVKAKRGKRPTAFQFLQEIKPEAVAYITIKTTLACLTSADNTTVQAVASAIGRAIEDEARFGRIRDLEAKHFKKNVEEQLNKEVGHVAKKAFMQVVEHDMLSKGLLGGEAWSSWHKEDSIHVGVRCIEMLIESTGMVSLHRQNAGVVGADSETIELAPEYAEAIATRAGALAGISPMFQPCVVPPKPWTGITGGGYWAAGRKPLQLVRTRSLAALRRYEEVSMPEVIKAVNIAQNTAWRINKKVLDVANTITQWQHCPVADVPAMDRGEMPARPLDIDTNEIALKAWKKEASAFYRKDKARMSRRLSMEFMLSQANKFANYEAIWFPQNMDWRGRVYAVPMFNPQGNDMTKGLLTFAQEKPIGEDGFYWLKIHGANTAGGDKVPFQQRIKFVEDNHTNIMECAKAPLENTWWAEQDSPFCFLAFCFEYAGVINSGLSYNCSLPLAFDGSCSGLQHFSAMLRDEIGGKAVNLLPSAEYQDIYRIVSDKVNEMLKQDLINGTSTTVETVTDKKTGEITQRTKYGTKVMAQWWLEHGVNRGVTKRPVMTLVYGSKEFGFRDQVLSDTIQPAIDNGKGDMFLNPNQAAGYMAKLIWNAVSGTVVAAVEAMNWLKSAAKLLAAEVKDEKTDTVLRGRCAVHWVTPDGFPVWQEYKKPIQTRLNLMFLGQFRLQPTINTNKDSEIDARKQVSGIAPNFVHSLNGNHLRMTVVWAHEKYGIESFALIHDSFGTIPADAANLFKAVRETFVDTYESCDVLADFYDQIVDQLHESQRDKMPALPAKGKLNLRDILKSDFAFA

SEQ ID NO: 1241 - DNA, 2670 bp, synthetic construct
  misc_feature 1..2670: note = Variant of RNA polymerase
  source 1..2670: mol_type = other DNA
atgcaccatcaccatcaccatatgaacacgattaacattgctaagaacgacttctctgacatcgaactggctgctatcccgttcaacactctggctgaccattacggtgagcgtttagctagtgaacagttggcccttgagcatgagtcttacgagatgggtgaagcacgcttccgcaagatgtttgagcgtcaacttaaagctggtgaggttgcggataacgctgccgccaagcctctcatcactaccctactccctaagatgattgcacgcatcaacgactggtttgaggaagtgaaagctaagcgcggcaagcgcccgacagccttccagttcctgcaagaaatcaagccggaagccgtagcgtacatcaccattaagaccactctggcttgcctaaccagcgaagacaatacaaccgttcaggctgtagcaagcgcaatcggtcgggccattgaggacgaggctcgcttcggtcgtatccgtgaccttgaagctaagcacttcaagaagaacgttgaggaacaactcaacaagcgcgtagggcacgtctacaagaaagcatttatgcaagttgtcgagcacgacatgctctctaagggtctactcggtggcgaggcgtggtcttcgtggcataaggaagactctattcatgtaggagtacgctgcatcgagatgctcattgagtcaaccggaatggttagcttacaccgccaaaatgctggcgtagtgggtgcagactctgagactatcgaactcgcacctgaatacgctgaggctatcgcaacccgtgcaggtgcgctggctggcatctctccgatgttccaaccttgcgtagttcctcctaagccgtggactggcattactggtggtggctattgggctgcggggcgcaaacccctgcagttagtacgtactcgcagtctggcggcgcttcgccgctatgaagaagtgtcgatgccggaggtcatcaaagcagtcaacattgcgcagaatacagcatggcgtattaacaagaaagttctcgacgtagcgaataccatcacccaatggcagcactgtccagtcgcggatgtgcctgcgatggatcgtggcgaaatgccagctcgtccgttggacatcgataccaacgagattgcacttaaagcgtggaagaaagaagcttccgcgttctaccgcaaagacaaagcacgcatgagccgtcgtctgtcgatggagtttatgttatctcaggcgaacaagtttggcaattatgaggttatctggtttccgcaaaacatggattggcgtgggcgcgtgtacgctgtcccgatgttcaatcctcagggcaacgatatgacgaaaggcctgctgacctttgcgcaggagaaacccattggtgaagacggcttctattggctcaagattcatggcgcaaatacagctggagtggataaagtaccgtttcagcaacgcatcaaatttgttgaggataaccatacgaatattatggaatgcgcgaaagcaccgctggaaaacacttggtgggcggaacaggactcgccgttctgctttctggcgttctgctttgagtatgctggcgtcatcaatagtggtctgtcgtacaactgtagcttgcctctggcatttgatggtagttgctccggcctgcaacatttctcagcgatgttacgcgacgaaattggcggcaaagctgtgaatctcctcccatctgcggaataccaggatatttatcgtatcgtcagcgacaaagttaacgagatgctgaaacaagatctgattaacggtacctctaccaccgtggaaacggtgactgataaaaagacaggcgaaattacccaacgcacgaaatacgggaccaaagttatggcacagtggtggttagaacacggtgtgaatcgtggcgtcacgaaacgcccggttatgactttggtgtatgggagcaaagagtttggattccgcgatcaagtgctgagtgacaccattcaaccggcgatcgataacggcaagggtgacatgtttctgaatccgaatcaggctgctggttacatggcgaaactgatctggaacgcagtgtccgggaccgtagtcgcagcagttgaggcgatgaactggctgaaaagtgcggcgaaattacttgctgctgaagtgaaggatgagaagacggatacagttctgcgtggccgctgcgcagtacattgggtgactcccgacggcttccctgtgtggcaggaatacaagaagcctattcaaacgcgcttgaacctgatgttcctcggtcagttccgcttacagcctaccattaacaccaacaaagatagcgagattgatgcacgcaaacaggtgtctggtatcgctcctaactttgtacacagcctggacggtaaccaccttcgtatgactgtagtgtgggcacacgagaagtacggaatcgaatcttttgcactgattcacgactccttcggtaccattccggctgacgctgcgaacctgcgcaaagcagtgcgcgaaactttcgttgacacatatgagtcttgtgatgtactggctgatttctacgaccagattgctgaccagttgcacgagtctcaacgcgacaaaatgccagcacttccggctaaaggtaagttgaacctccgtgacatcttaaaatcggacttcgcgttcgcg

SEQ ID NO: 1242 - protein, 890 aa, synthetic construct
  REGION 1..890: note = Variant of RNA polymerase
MHHHHHHMNTINIAKNDFSDIELAAIPFNTLADHYGERLASEQLALEHESYEMGEARFRKMFERQLKAGEVADNAAAKPLITTLLPKMIARINDWFEEVKAKRGKRPTAFQFLQEIKPEAVAYITIKTTLACLTSEDNTTVQAVASAIGRAIEDEARFGRIRDLEAKHFKKNVEEQLNKRVGHVYKKAFMQVVEHDMLSKGLLGGEAWSSWHKEDSIHVGVRCIEMLIESTGMVSLHRQNAGVVGADSETIELAPEYAEAIATRAGALAGISPMFQPCVVPPKPWTGITGGGYWAAGRKPLQLVRTRSLAALRRYEEVSMPEVIKAVNIAQNTAWRINKKVLDVANTITQWQHCPVADVPAMDRGEMPARPLDIDTNEIALKAWKKEASAFYRKDKARMSRRLSMEFMLSQANKFGNYEVIWFPQNMDWRGRVYAVPMFNPQGNDMTKGLLTFAQEKPIGEDGFYWLKIHGANTAGVDKVPFQQRIKFVEDNHTNIMECAKAPLENTWWAEQDSPFCFLAFCFEYAGVINSGLSYNCSLPLAFDGSCSGLQHFSAMLRDEIGGKAVNLLPSAEYQDIYRIVSDKVNEMLKQDLINGTSTTVETVTDKKTGEITQRTKYGTKVMAQWWLEHGVNRGVTKRPVMTLVYGSKEFGFRDQVLSDTIQPAIDNGKGDMFLNPNQAAGYMAKLIWNAVSGTVVAAVEAMNWLKSAAKLLAAEVKDEKTDTVLRGRCAVHWVTPDGFPVWQEYKKPIQTRLNLMFLGQFRLQPTINTNKDSEIDARKQVSGIAPNFVHSLDGNHLRMTVVWAHEKYGIESFALIHDSFGTIPADAANLRKAVRETFVDTYESCDVLADFYDQIADQLHESQRDKMPALPAKGKLNLRDILKSDFAFA

SEQ ID NO: 1243 - DNA, 2670 bp, synthetic construct
  misc_feature 1..2670: note = Variant of RNA polymerase
  source 1..2670: mol_type = other DNA
atgcaccatcaccatcaccatatgaacacgattaacattgctaagaacgacttctctgacatcgaactggctgctatcccgttcaacactctggctgaccattacggtgagcgtttagctagtgaacagttggcccttgagcatgagtcttacgagatgggtgaagcacgcttccgcaagatgtttgagcgtcaacttaaagctggtgaggttgcggataacgctgccgccaagcctctcatcactaccctactccctaagatgattgcacgcatcaacgactggtttgaggaagtgaaagctaagcgcggcaagcgcccgacagccttccagttcctgcaagaaatcaagccggaagccgtagcgtacatcaccattaagaccactctggcttgcctaaccagcgcagacaatacaaccgttcaggctgtagcaagcgcaatcggtcgggccattgaggacgaggctcgcttcggtcgtatccgtgaccttgaagctaagcacttcaagaagaacgttgaggaacaactcaacaagcgtgtagggcacgtcgcgaagaaagcatttatgcaagttgtcgagcacgacatgctctctaagggtctactcggtggcgaggcgtggtcttcgtggcataaggaagactctattcatgtaggagtacgctgcatcgagatgctcattgagtcaaccggaatggttagcttacaccgccaaaatgctggcgtagtgggtgcagactctgagactatcgaactcgcacctgaatacgctgaggctatcgcaacccgtgcaggtgcgctggctggcatctctccgatgttccaaccttgcgtagttcctcctaagccgtggactggcattactggtggtggctattgggctgcggggcgcaaacccctgcagttagtacgtactcgcagtctggcggcgcttcgccgctatgaagaagtgtcgatgccggaggtcatcaaagcagtcaacattgcgcagaatacagcatggcgtattaacaagaaagttctcgacgtagcgaataccatcacccaatggcagcactgtccagtcgcggatgtgcctgcgatggatcgtggcgaaatgccagctcgtccgttggacatcgataccaacgagattgcacttaaagcgtggaagaaagaagcttccgcgttctaccgcaaagacaaagcacgcatgagccgtcgtctgtcgatggagtttatgttatctcaggcgaacaagtttggcaattatgaggttatctggtttccgcaaaacatggattggcgtgggcgcgtgtacgctgtcccgatgttcaatcctcagggcaacgatatgacgaaaggcctgctgacctttgcgcaggagaaacccattggtgaagacggcttctattggctcaagattcatggcgcaaatacagctggagtggataaagtaccgtttccgcaacgcatcaaatttgttgaggataaccatacgaatattatggaatgcgcgaaagcaccgctggaaaacacttggtgggcggaacaggactcgccgttctgctttctggcgttctgctttgagtatgctggcgtcatcaatagtggtctgtcgtacaactgtagcttgcctctggcatttgatggtagttgctccggcctgcaacatttctcagcgatgttacgcgacgaaattggcggcaaagctgtgaatctcctcccatctgcggaataccaggatatttatcgtatcgtcagcgacaaagttaacgagatgctgaaacaagatctgattaacggtacctctaccaccgtggaaacggtgactgataaaaagacaggcgaaattacccaacgcacgaaatacgggaccaaagttatggcacagtggtggttagaacacggtgtgaatcgtggcgtcacgaaacgcccggttatgactttggtgtatgggagcaaagagtttggattccgcgatcaagtgctgagtgacaccattcaaccggcgatcgataacggcaagggtgacatgtttctgaatccgaatcaggctgctggttacatggcgaaactgatctggaacgcagtgtccgggaccgtagtcgcagcagttgaggcgatgaactggctgaaaagtgcggcgaaattacttgctgctgaagtgaaggatgagaagacggatacagttctgcgtggccgctgcgcagtacattgggtgactcccgacggcttccctgtgtggcaggaatacaagaagcctattcaaacgcgcttgaacctgatgttcctcggtcagttccgcttacagcctaccattaacaccaacaaagatagcgagattgatgcacgcaaacaggtgtctggtatcgctcctaactttgtacacagcctggacggtaaccaccttcgtatgactgtagtgtgggcacacgagaagtacggaatcgaatcttttgcactgattcacgactccttcggtaccattccggctgacgctgcgaacctgcgcaaagcagtgcgcgaaactttcgttgacacatatgagtcttgtgatgtactggctgatttctacgaccagattgctgaccagttgcacgagtctcaacgcgacaaaatgccagcacttccggctaaaggtaagttgaacctccgtgacatcttaaaatcggacttcgcgttcgcg

SEQ ID NO: 1244 - protein, 890 aa, synthetic construct
  REGION 1..890: note = Variant of RNA polymerase
MHHHHHHMNTINIAKNDFSDIELAAIPFNTLADHYGERLASEQLALEHESYEMGEARFRKMFERQLKAGEVADNAAAKPLITTLLPKMIARINDWFEEVKAKRGKRPTAFQFLQEIKPEAVAYITIKTTLACLTSADNTTVQAVASAIGRAIEDEARFGRIRDLEAKHFKKNVEEQLNKRVGHVAKKAFMQVVEHDMLSKGLLGGEAWSSWHKEDSIHVGVRCIEMLIESTGMVSLHRQNAGVVGADSETIELAPEYAEAIATRAGALAGISPMFQPCVVPPKPWTGITGGGYWAAGRKPLQLVRTRSLAALRRYEEVSMPEVIKAVNIAQNTAWRINKKVLDVANTITQWQHCPVADVPAMDRGEMPARPLDIDTNEIALKAWKKEASAFYRKDKARMSRRLSMEFMLSQANKFGNYEVIWFPQNMDWRGRVYAVPMFNPQGNDMTKGLLTFAQEKPIGEDGFYWLKIHGANTAGVDKVPFPQRIKFVEDNHTNIMECAKAPLENTWWAEQDSPFCFLAFCFEYAGVINSGLSYNCSLPLAFDGSCSGLQHFSAMLRDEIGGKAVNLLPSAEYQDIYRIVSDKVNEMLKQDLINGTSTTVETVTDKKTGEITQRTKYGTKVMAQWWLEHGVNRGVTKRPVMTLVYGSKEFGFRDQVLSDTIQPAIDNGKGDMFLNPNQAAGYMAKLIWNAVSGTVVAAVEAMNWLKSAAKLLAAEVKDEKTDTVLRGRCAVHWVTPDGFPVWQEYKKPIQTRLNLMFLGQFRLQPTINTNKDSEIDARKQVSGIAPNFVHSLDGNHLRMTVVWAHEKYGIESFALIHDSFGTIPADAANLRKAVRETFVDTYESCDVLADFYDQIADQLHESQRDKMPALPAKGKLNLRDILKSDFAFA

SEQ ID NO: 1245 - DNA, 2670 bp, synthetic construct
  misc_feature 1..2670: note = Variant of RNA polymerase
  source 1..2670: mol_type = other DNA
atgcaccatcaccatcaccatatgaacacgattaacattgctaagaacgacttctctgacatcgaactggctgctatcccgttcaacactctggctgaccattacggtgagcgtttagctagtgaacagttggcccttgagcatgagtcttacgagatgggtgaagcacgcttccgcaagatgtttgagcgtcaacttaaagctggtgaggttgcggataacgctgccgccaagcctctcatcactaccctactccctaagatgattgcacgcatcaacgactggtttgaggaagtgaaagctaagcgcggcaagcgcccgacagccttccagttcctgcaagaaatcaagccggaagccgtagcgtacatcaccattaagaccactctggcttgcctaaccagcgaagacaatacaaccgttcaggctgtagcaagcgcaatcggtcgggccattgaggacgaggctcgcttcggtcgtatccgtgaccttgaagctaagcacttcaagaagaacgttgaggaacaactcaacaaggaggtagggcacgtcgcgaagaaagcatttatgcaagttgtcgagcacgacatgctctctaagggtctactcggtggcgaggcgtggtcttcgtggcataaggaagactctattcatgtaggagtacgctgcatcgagatgctcattgagtcaaccggaatggttagcttacaccgccaaaatgctggcgtagtgggtgcagactctgagactatcgaactcgcacctgaatacgctgaggctatcgcaacccgtgcaggtgcgctggctggcatctctccgatgttccaaccttgcgtagttcctcctaagccgtggactggcattactggtggtggctattgggctgcggggcgcaaacccctgcagttagtacgtactcgcagtctggcggcgcttcgccgctatgaagaagtgtcgatgccggaggtcatcaaagcagtcaacattgcgcagaatacagcatggcgtattaacaagaaagttctcgacgtagcgaataccatcacccaatggcagcactgtccagtcgcggatgtgcctgcgatggatcgtggcgaaatgccagctcgtccgttggacatcgataccaacgagattgcacttaaagcgtggaagaaagaagcttccgcgttctaccgcaaagacaaagcacgcatgagccgtcgtctgtcgatggagtttatgttatctcaggcgaacaagtttgccaattatgaggttatctggtttccgcaaaacatggattggcgtgggcgcgtgtacgctgtcccgatgttcaatcctcagggcaacgatatgacgaaaggcctgctgacctttgcgcaggagaaacccattggtgaagacggcttctattggctcaagattcatggcgcaaatacagctggaggggataaagtaccgtttccacaacgcatcaaatttgttgaggataaccatacgaatattatggaatgcgcgaaagcaccgctggaaaacacttggtgggcggaacaggactcgccgttctgctttctggcgttctgctttgagtatgctggcgtcatcaatagtggtctgtcgtacaactgtagcttgcctctggcatttgatggtagttgctccggcctgcaacatttctcagcgatgttacgcgacgaaattggcggcaaagctgtgaatctcctcccatctgcggaataccaggatatttatcgtatcgtcagcgacaaagttaacgagatgctgaaacaagatctgattaacggtacctctaccaccgtggaaacggtgactgataaaaagacaggcgaaattacccaacgcacgaaatacgggaccaaagttatggcacagtggtggttagaacacggtgtgaatcgtggcgtcacgaaacgcccggttatgactttggtgtatgggagcaaagagtttggattccgcgatcaagtgctgagtgacaccattcaaccggcgatcgataacggcaagggtgacatgtttctgaatccgaatcaggctgctggttacatggcgaaactgatctggaacgcagtgtccgggaccgtagtcgcagcagttgaggcgatgaactggctgaaaagtgcggcgaaattacttgctgctgaagtgaaggatgagaagacggatacagttctgcgtggccgctgcgcagtacattgggtgactcccgacggcttccctgtgtggcaggaatacaagaagcctattcaaacgcgcttgaacctgatgttcctcggtcagttccgcttacagcctaccattaacaccaacaaagatagcgagattgatgcacgcaaacaggtgtctggtatcgctcctaactttgtacacagcctggacggtaaccaccttcgtatgactgtagtgtgggcacacgagaagtacggaatcgaatcttttgcactgattcacgactccttcggtaccattccggctgacgctgcgaacctgtttaaagcagtgcgcgaaactttcgttgacacatatgagtcttgtgatgtactggctgatttctacgaccagattgttgaccagttgcacgagtctcaacgcgacaaaatgccagcacttccggctaaaggtaagttgaacctccgtgacatcttaaaatcggacttcgcgttcgcg

SEQ ID NO: 1246 - protein, 890 aa, synthetic construct
  REGION 1..890: note = Variant of RNA polymerase
MHHHHHHMNTINIAKNDFSDIELAAIPFNTLADHYGERLASEQLALEHESYEMGEARFRKMFERQLKAGEVADNAAAKPLITTLLPKMIARINDWFEEVKAKRGKRPTAFQFLQEIKPEAVAYITIKTTLACLTSEDNTTVQAVASAIGRAIEDEARFGRIRDLEAKHFKKNVEEQLNKEVGHVAKKAFMQVVEHDMLSKGLLGGEAWSSWHKEDSIHVGVRCIEMLIESTGMVSLHRQNAGVVGADSETIELAPEYAEAIATRAGALAGISPMFQPCVVPPKPWTGITGGGYWAAGRKPLQLVRTRSLAALRRYEEVSMPEVIKAVNIAQNTAWRINKKVLDVANTITQWQHCPVADVPAMDRGEMPARPLDIDTNEIALKAWKKEASAFYRKDKARMSRRLSMEFMLSQANKFANYEVIWFPQNMDWRGRVYAVPMFNPQGNDMTKGLLTFAQEKPIGEDGFYWLKIHGANTAGGDKVPFPQRIKFVEDNHTNIMECAKAPLENTWWAEQDSPFCFLAFCFEYAGVINSGLSYNCSLPLAFDGSCSGLQHFSAMLRDEIGGKAVNLLPSAEYQDIYRIVSDKVNEMLKQDLINGTSTTVETVTDKKTGEITQRTKYGTKVMAQWWLEHGVNRGVTKRPVMTLVYGSKEFGFRDQVLSDTIQPAIDNGKGDMFLNPNQAAGYMAKLIWNAVSGTVVAAVEAMNWLKSAAKLLAAEVKDEKTDTVLRGRCAVHWVTPDGFPVWQEYKKPIQTRLNLMFLGQFRLQPTINTNKDSEIDARKQVSGIAPNFVHSLDGNHLRMTVVWAHEKYGIESFALIHDSFGTIPADAANLFKAVRETFVDTYESCDVLADFYDQIVDQLHESQRDKMPALPAKGKLNLRDILKSDFAFA

SEQ ID NO: 1247 - DNA, 2670 bp, synthetic construct
  misc_feature 1..2670: note = Variant of RNA polymerase
  source 1..2670: mol_type = other DNA
atgcaccatcaccatcaccatatgaacacgattaacattgctaagaacgacttctctgacatcgaactggctgctatcccgttcaacactctggctgaccattacggtgagcgtttagctcgcgaacagttggcccttgagcatgagtcttacgagatgggtgaagcacgcttccgcaagatgtttgagcgtcaacttaaagctggtgaggttgcggataacgctgccgccaagcctctcatcactaccctactccctaagatgattgcacgcatcaacgactggtttgaggaagtgaaagctaagcgcggcaagcgcccgacagccttccagttcctgcaagaaatcaagccggaagccgtagcgtacatcaccattaagaccactctggcttgcctaaccagtgcggacaatacaaccgttcaggctgtagcaagcgcaatcggtcgggccattgaggacgaggctcgcttcggtcgtatccgtgaccttgaagctaagcacttcaagaagaacgttgaggaacaactcaacaagcgcgtagggcacgtctacaagaaagcatttatgcaagttgtcgagcacgacatgctctctaagggtctactcggtggcgaggcgtggtcttcgtggcataaggaagactctattcatgtaggagtacgctgcatcgagatgctcattgagtcaaccggaatggttagcttacaccgccaaaatgctggcgtagtgggtgcagactctgagactatcgaactcgcacctgaatacgctgaggctatcgcaacccgtgcaggtgcgctggctggcatctctccgatgttccaaccttgcgtagttcctcctaagccgtggactggcattactggtggtggctattgggctgcggggcgcaaacccctgcagttagtacgtactcacagtctggcggcgcttcgccgctatgaagaagtgtcgatgccggaggtcatcaaagcagtcaacattgcgcagaatacagcatggcgtattaacaagaaagttctcgacgtagcgaataccatcacccaatggcagcactgtccagtcgcggatgtgcctgcgatggatcgtggcgaaatgccagctcgtccgttggacatcgataccaacgagattgcacttaaagcgtggaagaaagaagcttccgcgttctaccgcaaagacaaagcacgcatgagccgtcgtctgtcgatggagtttatgttatctcaggcgaacaagtttgcgaattatgaggcaatctggtttccgcaaaacatggattggcgtgggcgcgtgtacgctgtcccgatgttcaatcctcagggcaacgatatgacgaaaggcctgctgacctttgcgcaggagaaacccattggtgaagacggcttctattggctcaagattcatggcgcaaatacagctggagtggataaagtaccgtttccacaacgcatcaaatttgttgaggataaccatacgaatattatggaatgcgcgaaagcaccgctggaaaacacttggtgggcggaacaggactcgccgttctgctttctggcgttctgctttgagtatgctggcgtcatcaatagtggtctgtcgtacaactgtagcttgcctctggcatttgatggtagttgctccggcctgcaacatttctcagcgatgttacgcgacgaaattggcggcaaagctgtgaatctcctcccatctgcggaataccaggatatttatcgtatcgtcagcgacaaagttaacgagatgctgaaacaagatctgattaacggtacctctaccaccgtggaaacggtgactgataaaaagacaggcgaaattacccaacgcacgaaatacgggaccaaagttatggcacagtggtggttagaacacggtgtgaatcgtggcgtcacgaaacgcccggttatgactttggtgtatgggagcaaagagtttggattccgcgatcaagtgctgagtgacaccattcaaccggcgatcgataacggcaagggtgacatgtttctgaatccgaatcaggctgctggttacatggcgaaactgatctggaacgcagtgtccgggaccgtagtcgcagcagttgaggcgatgaactggctgaaaagtgcggcgaaattacttgctgctgaagtgaaggatgagaagacggatacagttctgcgtggccgctgcgcagtacattgggtgactcccgacggcttccctgtgtggcaggaatacaagaagcctattcaaacgcgcttgaacctgatgttcctcggtcagttccgcttacagcctaccattaacaccaacaaagatagcgagattgatgcacgcaaacaggtgtctggtatcgctcctaactttgtacacagcctgaacggtaaccaccttcgtatgactgtagtgtgggcacacgagaagtacggaatcgaatcttttgcactgattcacgactccttcggtaccattccggctgacgctgcgaacctgtttaaagcagtgcgcgaaactttcgttgacacatatgagtcttgtgatgtactggctgatttctacgaccagattgctgaccagttgcacgagtctcaacgcgacaaaatgccagcacttccggctaaaggtaagttgaacctccgtgacatcttaaaatcggacttcgcgttcgcg

SEQ ID NO: 1248 - protein, 890 aa, synthetic construct
  REGION 1..890: note = Variant of RNA polymerase
MHHHHHHMNTINIAKNDFSDIELAAIPFNTLADHYGERLAREQLALEHESYEMGEARFRKMFERQLKAGEVADNAAAKPLITTLLPKMIARINDWFEEVKAKRGKRPTAFQFLQEIKPEAVAYITIKTTLACLTSADNTTVQAVASAIGRAIEDEARFGRIRDLEAKHFKKNVEEQLNKRVGHVYKKAFMQVVEHDMLSKGLLGGEAWSSWHKEDSIHVGVRCIEMLIESTGMVSLHRQNAGVVGADSETIELAPEYAEAIATRAGALAGISPMFQPCVVPPKPWTGITGGGYWAAGRKPLQLVRTHSLAALRRYEEVSMPEVIKAVNIAQNTAWRINKKVLDVANTITQWQHCPVADVPAMDRGEMPARPLDIDTNEIALKAWKKEASAFYRKDKARMSRRLSMEFMLSQANKFANYEAIWFPQNMDWRGRVYAVPMFNPQGNDMTKGLLTFAQEKPIGEDGFYWLKIHGANTAGVDKVPFPQRIKFVEDNHTNIMECAKAPLENTWWAEQDSPFCFLAFCFEYAGVINSGLSYNCSLPLAFDGSCSGLQHFSAMLRDEIGGKAVNLLPSAEYQDIYRIVSDKVNEMLKQDLINGTSTTVETVTDKKTGEITQRTKYGTKVMAQWWLEHGVNRGVTKRPVMTLVYGSKEFGFRDQVLSDTIQPAIDNGKGDMFLNPNQAAGYMAKLIWNAVSGTVVAAVEAMNWLKSAAKLLAAEVKDEKTDTVLRGRCAVHWVTPDGFPVWQEYKKPIQTRLNLMFLGQFRLQPTINTNKDSEIDARKQVSGIAPNFVHSLNGNHLRMTVVWAHEKYGIESFALIHDSFGTIPADAANLFKAVRETFVDTYESCDVLADFYDQIADQLHESQRDKMPALPAKGKLNLRDILKSDFAFA

SEQ ID NO: 1249 - DNA, 2670 bp, synthetic construct
  misc_feature 1..2670: note = Variant of RNA polymerase
  source 1..2670: mol_type = other DNA
atgcaccatcaccatcaccatatgaacacgattaacattgctaagaacgacttctctgacatcgaactggctgctatcccgttcaacactctggctgaccattacggtgagcgtttagctcgtgaacagttggcccttgagcatgagtcttacgagatgggtgaagcacgcttccgcgagatgtttgagcgtcaacttaaagctggtgaggttgcggataacgctgccgccaagcctctcatcactaccctactccctaagatgattgcacgcatcaacgactggtttgaggaagtgaaagctaagcgcggcaagcgcccgacagccttccagttcctgcaagaaatcaagccggaagccgtagcgtacatcaccattaagaccactctggcttgcctaacccgcgaagacaatacaaccgttcaggctgtagcaagcgcaatcggtcgggccattgaggacgaggctcgcttcggtcgtatccgtgaccttgaagctaagcacttcaagaagaacgttgaggaacaactcaacaagcgcgtagggcacgtcgcgaagaaagcatttatgcaagttgtcgagcacgacatgctctctaagggtctactcggtggcgaggcgtggtcttcgtggcataaggaagactctattcatgtaggagtacgctgcatcgagatgctcattgagtcaaccggaatggttagcttacaccgccaaaatgctggcgtagtgggtgcagactctgagactatcgaactcgcacctgaatacgctgaggctatcgcaacccgtgcaggtgcgctggctggcatctctccgatgttccaaccttgcgtagttcctcctaagccgtggactggcattactggtggtggctattgggctgcggggcgcaaacccctgcagttagtacgtactcgcagtctggcggcgcttcgccgctatgaagaagtgtcgatgccggaggtcatcaaagcagtcaacattgcgcagaatacagcatggcgtattaacaagaaagttctcgacgtagcgaataccatcacccaatggcagcactgtccagtcgcggatgtgcctgcgatggatcgtggcgaaatgccagctcgtccgttggacatcgataccaacgagattgcacttaaagcgtggaagaaagaagcttccgcgttctaccgcaaagacaaagcacgcatgagccgtcgtctgtcgatggagtttatgttatctcaggcgaacaagtttgccaattatgaggttatctggtttccgcaaaacatggattggcgtgggcgcgtgtacgctgtcccgatgttcaatcctcagggcaacgatatgacgaaaggcctgctgacctttgcgcaggagaaacccattggtgaagacggcttctattggctcaagattcatggcgcaaatacagctggagtggataaagtaccgtttccacaacgcatcaaatttgttgaggataaccatacgaatattatggaatgcgcgaaagcaccgctggaaaacacttggtgggcggaacaggactcgccgttctgctttctggcgttctgctttgagtatgctggcgtcatcaatagtggtctgtcgtacaactgtagcttgcctctggcatttgatggtagttgctccggcctgcaacatttctcagcgatgttacgcgacgaaattggcggcaaagctgtgaatctcctcccatctgcggaataccaggatatttatcgtatcgtcagcgacaaagttaacgagatgctgaaacaagatctgattaacggtacctctaccaccgtggaaacggtgactgataaaaagacaggcgaaattacccaacgcacgaaatacgggaccaaagttatggcacagtggtggttagaacacggtgtgaatcgtggcgtcacgaaacgcccggttatgactttggtgtatgggagcaaagagtttggattccgcgatcaagtgctgagtgacaccattcaaccggcgatcgataacggcaagggtgacatgtttctgaatccgaatcaggctgctggttacatggcgaaactgatctggaacgcagtgtccgggaccgtagtcgcagcagttgaggcgatgaactggctgaaaagtgcggcgaaattacttgctgctgaagtgaaggatgagaagacggatacagttctgcgtggccgctgcgcagtacattgggtgactcccgacggcttccctgtgtggcaggaatacaagaagcctattcaaacgcgcttgaacctgatgttcctcggtcagttccgcttacagcctaccattaacaccaacaaagatagcgagattgatgcacgcaaacaggtgtctggtatcgctcctaactttgtacacagcctggacggtaaccaccttcgtatgactgtagtgtgggcacacgagaagtacggaatcgaatcttttgcactgattcacgactccttcggtaccattccggctgacgctgcgaacctgttcaaagcagtgcgcgaaactttcgttgacacatatgagtcttgtgatgtactggctgatttctacgaccagattgttgaccagttgcacgagtctcaacgcgacaaaatgccagcacttccggctaaaggtaagttgaacctccgtgacatcttaaaatcggacttcgcgttcgcg

SEQ ID NO: 1250 - protein, 890 aa, synthetic construct
  REGION 1..890: note = Variant of RNA polymerase
MHHHHHHMNTINIAKNDFSDIELAAIPFNTLADHYGERLAREQLALEHESYEMGEARFREMFERQLKAGEVADNAAAKPLITTLLPKMIARINDWFEEVKAKRGKRPTAFQFLQEIKPEAVAYITIKTTLACLTREDNTTVQAVASAIGRAIEDEARFGRIRDLEAKHFKKNVEEQLNKRVGHVAKKAFMQVVEHDMLSKGLLGGEAWSSWHKEDSIHVGVRCIEMLIESTGMVSLHRQNAGVVGADSETIELAPEYAEAIATRAGALAGISPMFQPCVVPPKPWTGITGGGYWAAGRKPLQLVRTRSLAALRRYEEVSMPEVIKAVNIAQNTAWRINKKVLDVANTITQWQHCPVADVPAMDRGEMPARPLDIDTNEIALKAWKKEASAFYRKDKARMSRRLSMEFMLSQANKFANYEVIWFPQNMDWRGRVYAVPMFNPQGNDMTKGLLTFAQEKPIGEDGFYWLKIHGANTAGVDKVPFPQRIKFVEDNHTNIMECAKAPLENTWWAEQDSPFCFLAFCFEYAGVINSGLSYNCSLPLAFDGSCSGLQHFSAMLRDEIGGKAVNLLPSAEYQDIYRIVSDKVNEMLKQDLINGTSTTVETVTDKKTGEITQRTKYGTKVMAQWWLEHGVNRGVTKRPVMTLVYGSKEFGFRDQVLSDTIQPAIDNGKGDMFLNPNQAAGYMAKLIWNAVSGTVVAAVEAMNWLKSAAKLLAAEVKDEKTDTVLRGRCAVHWVTPDGFPVWQEYKKPIQTRLNLMFLGQFRLQPTINTNKDSEIDARKQVSGIAPNFVHSLDGNHLRMTVVWAHEKYGIESFALIHDSFGTIPADAANLFKAVRETFVDTYESCDVLADFYDQIVDQLHESQRDKMPALPAKGKLNLRDILKSDFAFA

SEQ ID NO: 1251 - DNA, 2670 bp, synthetic construct
  misc_feature 1..2670: note = Variant of RNA polymerase
  source 1..2670: mol_type = other DNA
atgcaccatcaccatcaccatatgaacacgattaacattgctaagaacgacttctctgacatcgaactggctgctatcccgttcaacactctggctgaccattacggtgagcgtttagctcgtgaacagttggcccttgagcatgagtcttacgagatgggtgaagcacgcttccgcgagatgtttgagcgtcaacttaaagctggtgaggttgcggataacgctgccgccaagcctctcatcactaccctactccctaagatgattgcacgcatcaacgactggtttgaggaagtgaaagctaagcgcggcaagcgcccgacagccttccagttcctgcaagaaatcaagccggaagccgtagcgtacatcaccattaagaccactctggcttgcctaacccgcgaagacaatacaaccgttcaggctgtagcaagcgcaatcggtcgggccattgaggacgaggctcgcttcggtcgtatccgtgaccttgaagctaagcacttcaagaagaacgttgaggaacaactcaacaagcgtgtagggcacgtcgcgaagaaagcatttatgcaagttgtcgagcacgacatgctctctaagggtctactcggtggcgaggcgtggtcttcgtggcataaggaagactctattcatgtaggagtacgctgcatcgagatgctcattgagtcaaccggaatggttagcttacaccgccaaaatgctggcgtagtgggtgcagactctgagactatcgaactcgcacctgaatacgctgaggctatcgcaacccgtgcaggtgcgctggctggcatctctccgatgttccaaccttgcgtagttcctcctaagccgtggactggcattactggtggtggctattgggctgcggggcgcaaacccctgcagttagtacgtactcgcagtctggcggcgcttcgccgctatgaagaagtgtcgatgccggaggtcatcaaagcagtcaacattgcgcagaatacagcatggcgtattaacaagaaagttctcgacgtagcgaataccatcacccaatggcagcactgtccagtcgcggatgtgcctgcgatggatcgtggcgaaatgccagctcgtccgttggacatcgataccaacgagattgcacttaaagcgtggaagaaagaagcttccgcgttctaccgcaaagacaaagcacgcatgagccgtcgtctgtcgatggagtttatgttatctcaggcgaacaagtttggcaattatgaggctatctggtttccgcaaaacatggattggcgtgggcgcgtgtacgctgtcccgatgttcaatcctcagggcaacgatatgacgaaaggcctgctgacctttgcgcaggagaaacccattggtgaagacggcttctattggctcaagattcatggcgcaaatacagctggagtggataaagtaccgtttccacaacgcatcaaatttgttgaggataaccatacgaatattatggaatgcgcgaaagcaccgctggaaaacacttggtgggcggaacaggactcgccgttctgctttctggcgttctgctttgagtatgctggcgtcatcaatagtggtctgtcgtacaactgtagcttgcctctggcatttgatggtagttgctccggcctgcaacatttctcagcgatgttacgcgacgaaattggcggcaaagctgtgaatctcctcccatctgcggaataccaggatatttatcgtatcgtcagcgacaaagttaacgagatgctgaaacaagatctgattaacggtacctctaccaccgtggaaacggtgactgataaaaagacaggcgaaattacccaacgcacgaaatacgggaccaaagttatggcacagtggtggttagaacacggtgtgaatcgtggcgtcacgaaacgcccggttatgactttggtgtatgggagcaaagagtttggattccgcgatcaagtgctgagtgacaccattcaaccggcgatcgataacggcaagggtgacatgtttctgaatccgaatcaggctgctggttacatggcgaaactgatctggaacgcagtgtccgggaccgtagtcgcagcagttgaggcgatgaactggctgaaaagtgcggcgaaattacttgctgctgaagtgaaggatgagaagacggatacagttctgcgtggccgctgcgcagtacattgggtgactcccgacggcttccctgtgtggcaggaatacaagaagcctattcaaacgcgcttgaacctgatgttcctcggtcagttccgcttacagcctaccattaacaccaacaaagatagcgagattgatgcacgcaaacaggtgtctggtatcgctcctaactttgtacacagcctggacggtaaccaccttcgtatgactgtagtgtgggcacacgagaagtacggaatcgaatcttttgcactgattcacgactccttcggtaccattccggctgacgctgcgaacctgttcaaagcagtgcgcgaaactttcgttgacacatatgagtcttgtgatgtactggctgatttctacgaccagattgctgaccagttgcacgagtctcaacgcgacaaaatgccagcacttccggctaaaggtaagttgaacctccgtgacatcttaaaatcggacttcgcgttcgcg

SEQ ID NO: 1252 - protein, 890 aa, synthetic construct
  REGION 1..890: note = Variant of RNA polymerase
MHHHHHHMNTINIAKNDFSDIELAAIPFNTLADHYGERLAREQLALEHESYEMGEARFREMFERQLKAGEVADNAAAKPLITTLLPKMIARINDWFEEVKAKRGKRPTAFQFLQEIKPEAVAYITIKTTLACLTREDNTTVQAVASAIGRAIEDEARFGRIRDLEAKHFKKNVEEQLNKRVGHVAKKAFMQVVEHDMLSKGLLGGEAWSSWHKEDSIHVGVRCIEMLIESTGMVSLHRQNAGVVGADSETIELAPEYAEAIATRAGALAGISPMFQPCVVPPKPWTGITGGGYWAAGRKPLQLVRTRSLAALRRYEEVSMPEVIKAVNIAQNTAWRINKKVLDVANTITQWQHCPVADVPAMDRGEMPARPLDIDTNEIALKAWKKEASAFYRKDKARMSRRLSMEFMLSQANKFGNYEAIWFPQNMDWRGRVYAVPMFNPQGNDMTKGLLTFAQEKPIGEDGFYWLKIHGANTAGVDKVPFPQRIKFVEDNHTNIMECAKAPLENTWWAEQDSPFCFLAFCFEYAGVINSGLSYNCSLPLAFDGSCSGLQHFSAMLRDEIGGKAVNLLPSAEYQDIYRIVSDKVNEMLKQDLINGTSTTVETVTDKKTGEITQRTKYGTKVMAQWWLEHGVNRGVTKRPVMTLVYGSKEFGFRDQVLSDTIQPAIDNGKGDMFLNPNQAAGYMAKLIWNAVSGTVVAAVEAMNWLKSAAKLLAAEVKDEKTDTVLRGRCAVHWVTPDGFPVWQEYKKPIQTRLNLMFLGQFRLQPTINTNKDSEIDARKQVSGIAPNFVHSLDGNHLRMTVVWAHEKYGIESFALIHDSFGTIPADAANLFKAVRETFVDTYESCDVLADFYDQIADQLHESQRDKMPALPAKGKLNLRDILKSDFAFA

SEQ ID NO: 1253 - DNA, 2670 bp, synthetic construct
  misc_feature 1..2670: note = Variant of RNA polymerase
  source 1..2670: mol_type = other DNA
atgcaccatcaccatcaccatatgaacacgattaacattgctaagaacgacttctctgacatcgaactggctgctatcccgttcaacactctggctgaccattacggtgagcgtttagctcgcgaacagttggcccttgagcatgagtcttacgagatgggtgaagcacgcttccgcaagatgtttgagcgtcaacttaaagctggtgaggttgcggataacgctgccgccaagcctctcatcactaccctactccctaagatgattgcacgcatcaacgactggtttgaggaagtgaaagctaagcgcggcaagcgcccgacagccttccagttcctgcaagaaatcaagccggaagccgtagcgtacatcaccattaagaccactctggcttgcctaaccagcgcagacaatacaaccgttcaggctgtagcaagcgcaatcggtcgggccattgaggacgaggctcgcttcggtcgtatccgtgaccttgaagctaagcacttcaagaagaacgttgaggaacaactcaacaagaaggtagggcacgtctacaagaaagcatttatgcaagttgtcgagcacgacatgctctctaagggtctactcggtggcgaggcgtggtcttcgtggcataaggaagactctattcatgtaggagtacgctgcatcgagatgctcattgagtcaaccggaatggttagcttacaccgccaaaatgctggcgtagtgggtgcagactctgagactatcgaactcgcacctgaatacgctgaggctatcgcaacccgtgcaggtgcgctggctggcatctctccgatgttccaaccttgcgtagttcctcctaagccgtggactggcattactggtggtggctattgggctgcggggcgcaaacccctgcagttagtacgtactcacagtctggcggcgcttcgccgctatgaagaagtgtcgatgccggaggtcatcaaagcagtcaacattgcgcagaatacagcatggcgtattaacaagaaagttctcgacgtagcgaataccatcacccaatggcagcactgtccagtcgcggatgtgcctgcgatggatcgtggcgaaatgccagctcgtccgttggacatcgataccaacgagattgcacttaaagcgtggaagaaagaagcttccgcgttctaccgcaaagacaaagcacgcatgagccgtcgtctgtcgatggagtttatgttatctcaggcgaacaagtttgcgaattatgaggttatctggtttccgcaaaacatggattggcgtgggcgcgtgtacgctgtcccgatgttcaatcctcagggcaacgatatgacgaaaggcctgctgacctttgcgcaggagaaacccattggtgaagacggcttctattggctcaagattcatggcgcaaatacagctggagtggataaagtaccgtttccacaacgcatcaaatttgttgaggataaccatacgaatattatggaatgcgcgaaagcaccgctggaaaacacttggtgggcggaacaggactcgccgttctgctttctggcgttctgctttgagtatgctggcgtcatcaatagtggtctgtcgtacaactgtagcttgcctctggcatttgatggtagttgctccggcctgcaacatttctcagcgatgttacgcgacgaaattggcggcaaagctgtgaatctcctcccatctgcggaataccaggatatttatcgtatcgtcagcgacaaagttaacgagatgctgaaacaagatctgattaacggtacctctaccaccgtggaaacggtgactgataaaaagacaggcgaaattacccaacgcacgaaatacgggaccaaagttatggcacagtggtggttagaacacggtgtgaatcgtggcgtcacgaaacgcccggttatgactttggtgtatgggagcaaagagtttggattccgcgatcaagtgctgagtgacaccattcaaccggcgatcgataacggcaagggtgacatgtttctgaatccgaatcaggctgctggttacatggcgaaactgatctggaacgcagtgtccgggaccgtagtcgcagcagttgaggcgatgaactggctgaaaagtgcggcgaaattacttgctgctgaagtgaaggatgagaagacggatacagttctgcgtggccgctgcgcagtacattgggtgactcccgacggcttccctgtgtggcaggaatacaagaagcctattcaaacgcgcttgaacctgatgttcctcggtcagttccgcttacagcctaccattaacaccaacaaagatagcgagattgatgcacgcaaacaggtgtctggtatcgctcctaactttgtacacagcctggacggtaaccaccttcgtatgactgtagtgtgggcacacgagaagtacggaatcgaatcttttgcactgattcacgactccttcggtaccattccggctgacgctgcgaacctgcgcaaagcagtgcgcgaaactttcgttgacacatatgagtcttgtgatgtactggctgatttctacgaccagattgctgaccagttgcacgagtctcaacgcgacaaaatgccagcacttccggctaaaggtaagttgaacctccgtgacatcttaaaatcggacttcgcgttcgcg

SEQ ID NO: 1254 - protein, 890 aa, synthetic construct
  REGION 1..890: note = Variant of RNA polymerase
MHHHHHHMNTINIAKNDFSDIELAAIPFNTLADHYGERLAREQLALEHESYEMGEARFRKMFERQLKAGEVADNAAAKPLITTLLPKMIARINDWFEEVKAKRGKRPTAFQFLQEIKPEAVAYITIKTTLACLTSADNTTVQAVASAIGRAIEDEARFGRIRDLEAKHFKKNVEEQLNKKVGHVYKKAFMQVVEHDMLSKGLLGGEAWSSWHKEDSIHVGVRCIEMLIESTGMVSLHRQNAGVVGADSETIELAPEYAEAIATRAGALAGISPMFQPCVVPPKPWTGITGGGYWAAGRKPLQLVRTHSLAALRRYEEVSMPEVIKAVNIAQNTAWRINKKVLDVANTITQWQHCPVADVPAMDRGEMPARPLDIDTNEIALKAWKKEASAFYRKDKARMSRRLSMEFMLSQANKFANYEVIWFPQNMDWRGRVYAVPMFNPQGNDMTKGLLTFAQEKPIGEDGFYWLKIHGANTAGVDKVPFPQRIKFVEDNHTNIMECAKAPLENTWWAEQDSPFCFLAFCFEYAGVINSGLSYNCSLPLAFDGSCSGLQHFSAMLRDEIGGKAVNLLPSAEYQDIYRIVSDKVNEMLKQDLINGTSTTVETVTDKKTGEITQRTKYGTKVMAQWWLEHGVNRGVTKRPVMTLVYGSKEFGFRDQVLSDTIQPAIDNGKGDMFLNPNQAAGYMAKLIWNAVSGTVVAAVEAMNWLKSAAKLLAAEVKDEKTDTVLRGRCAVHWVTPDGFPVWQEYKKPIQTRLNLMFLGQFRLQPTINTNKDSEIDARKQVSGIAPNFVHSLDGNHLRMTVVWAHEKYGIESFALIHDSFGTIPADAANLRKAVRETFVDTYESCDVLADFYDQIADQLHESQRDKMPALPAKGKLNLRDILKSDFAFA

SEQ ID NO: 1255 - DNA, 2670 bp, synthetic construct
  misc_feature 1..2670: note = Variant of RNA polymerase
  source 1..2670: mol_type = other DNA
atgcaccatcaccatcaccatatgaacacgattaacattgctaagaacgacttctctgacatcgaactggctgctatcccgttcaacactctggctgaccattacggtgagcgtttagctcgtgaacagttggcccttgagcatgagtcttacgagatgggtgaagcacgcttccgcaagatgtttgagcgtcaacttaaagctggtgaggttgcggataacgctgccgccaagcctctcatcactaccctactccctaagatgattgcacgcatcaacgactggtttgaggaagtgaaagctaagcgcggcaagcgcccgacagccttccagttcctgcaagaaatcaagccggaagccgtagcgtacatcaccattaagaccactctggcttgcctaaccagcgaagacaatacaaccgttcaggctgtagcaagcgcaatcggtcgggccattgaggacgaggctcgcttcggtcgtatccgtgaccttgaagctaagcacttcaagaagaacgttgaggaacaactcaacaaggaggtagggcacgtcgacaagaaagcatttatgcaagttgtcgagcacgacatgctctctaagggtctactcggtggcgaggcgtggtcttcgtggcataaggaagactctattcatgtaggagtacgctgcatcgagatgctcattgagtcaaccggaatggttagcttacaccgccaaaatgctggcgtagtgggtgcagactctgagactatcgaactcgcacctgaatacgctgaggctatcgcaacccgtgcaggtgcgctggctggcatctctccgatgttccaaccttgcgtagttcctcctaagccgtggactggcattactggtggtggctattgggctgcggggcgcaaacccctgcagttagtacgtactcgcagtctggcggcgcttcgccgctatgaagaagtgtcgatgccggaggtcatcaaagcagtcaacattgcgcagaatacagcatggcgtattaacaagaaagttctcgacgtagcgaataccatcacccaatggcagcactgtccagtcgcggatgtgcctgcgatggatcgtggcgaaatgccagctcgtccgttggacatcgataccaacgagattgcacttaaagcgtggaagaaagaagcttccgcgttctaccgcaaagacaaagcacgcatgagccgtcgtctgtcgatggagtttatgttatctcaggcgaacaagtttggcaattatgaggctatctggtttccgcaaaacatggattggcgtgggcgcgtgtacgctgtcccgatgttcaatcctcagggcaacgatatgacgaaaggcctgctgacctttgcgcaggagaaacccattggtgaagacggcttctattggctcaagattcatggcgcaaatacagctggagtggataaagtaccgtttccacaacgcatcaaatttgttgaggataaccatacgaatattatggaatgcgcgaaagcaccgctggaaaacacttggtgggcggaacaggactcgccgttctgctttctggcgttctgctttgagtatgctggcgtcatcaatagtggtctgtcgtacaactgtagcttgcctctggcatttgatggtagttgctccggcctgcaacatttctcagcgatgttacgcgacgaaattggcggcaaagctgtgaatctcctcccatctgcggaataccaggatatttatcgtatcgtcagcgacaaagttaacgagatgctgaaacaagatctgattaacggtacctctaccaccgtggaaacggtgactgataaaaagacaggcgaaattacccaacgcacgaaatacgggaccaaagttatggcacagtggtggttagaacacggtgtgaatcgtggcgtcacgaaacgcccggttatgactttggtgtatgggagcaaagagtttggattccgcgatcaagtgctgagtgacaccattcaaccggcgatcgataacggcaagggtgacatgtttctgaatccgaatcaggctgctggttacatggcgaaactgatctggaacgcagtgtccgggaccgtagtcgcagcagttgaggcgatgaactggctgaaaagtgcggcgaaattacttgctgctgaagtgaaggatgagaagacggatacagttctgcgtggccgctgcgcagtacattgggtgactcccgacggcttccctgtgtggcaggaatacaagaagcctattcaaacgcgcttgaacctgatgttcctcggtcagttccgcttacagcctaccattaacaccaacaaagatagcgagattgatgcacgcaaacaggtgtctggtatcgctcctaactttgtacacagcctggacggtaaccaccttcgtatgactgtagtgtgggcacacgagaagtacggaatcgaatcttttgcactgattcacgactccttcggtaccattccggctgacgctgcgaacctgtttaaagcagtgcgcgaaactttcgttgacacatatgagtcttgtgatgtactggctgatttctacgaccagattgctgaccagttgcacgagtctcaacgcgacaaaatgccagcacttccggctaaaggtaagttgaacctccgtgacatcttaaaatcggacttcgcgttcgcg

SEQ ID NO: 1256 - protein, 890 aa, synthetic construct
  REGION 1..890: note = Variant of RNA polymerase
MHHHHHHMNTINIAKNDFSDIELAAIPFNTLADHYGERLAREQLALEHESYEMGEARFRKMFERQLKAGEVADNAAAKPLITTLLPKMIARINDWFEEVKAKRGKRPTAFQFLQEIKPEAVAYITIKTTLACLTSEDNTTVQAVASAIGRAIEDEARFGRIRDLEAKHFKKNVEEQLNKEVGHVDKKAFMQVVEHDMLSKGLLGGEAWSSWHKEDSIHVGVRCIEMLIESTGMVSLHRQNAGVVGADSETIELAPEYAEAIATRAGALAGISPMFQPCVVPPKPWTGITGGGYWAAGRKPLQLVRTRSLAALRRYEEVSMPEVIKAVNIAQNTAWRINKKVLDVANTITQWQHCPVADVPAMDRGEMPARPLDIDTNEIALKAWKKEASAFYRKDKARMSRRLSMEFMLSQANKFGNYEAIWFPQNMDWRGRVYAVPMFNPQGNDMTKGLLTFAQEKPIGEDGFYWLKIHGANTAGVDKVPFPQRIKFVEDNHTNIMECAKAPLENTWWAEQDSPFCFLAFCFEYAGVINSGLSYNCSLPLAFDGSCSGLQHFSAMLRDEIGGKAVNLLPSAEYQDIYRIVSDKVNEMLKQDLINGTSTTVETVTDKKTGEITQRTKYGTKVMAQWWLEHGVNRGVTKRPVMTLVYGSKEFGFRDQVLSDTIQPAIDNGKGDMFLNPNQAAGYMAKLIWNAVSGTVVAAVEAMNWLKSAAKLLAAEVKDEKTDTVLRGRCAVHWVTPDGFPVWQEYKKPIQTRLNLMFLGQFRLQPTINTNKDSEIDARKQVSGIAPNFVHSLDGNHLRMTVVWAHEKYGIESFALIHDSFGTIPADAANLFKAVRETFVDTYESCDVLADFYDQIADQLHESQRDKMPALPAKGKLNLRDILKSDFAFA

SEQ ID NO: 1257 - DNA, 2670 bp, synthetic construct
  misc_feature 1..2670: note = Variant of RNA polymerase
  source 1..2670: mol_type = other DNA
atgcaccatcaccatcaccatatgaacacgattaacattgctaagaacgacttctctgacatcgaactggctgctatcccgttcaacactctggctgaccattacggtgagcgtttagctagtgaacagttggcccttgagcatgagtcttacgagatgggtgaagcacgcttccgcgagatgtttgagcgtcaacttaaagctggtgaggttgcggataacgctgccgccaagcctctcatcactaccctactccctaagatgattgcacgcatcaacgactggtttgaggaagtgaaagctaagcgcggcaagcgcccgacagccttccagttcctgcaagaaatcaagccggaagccgtagcgtacatcaccattaagaccactctggcttgcctaaccagcgcagacaatacaaccgttcaggctgtagcaagcgcaatcggtcgggccattgaggacgaggctcgcttcggtcgtatccgtgaccttgaagctaagcacttcaagaagaacgttgaggaacaactcaacaaggaggtagggcacgtcgcgaagaaagcatttatgcaagttgtcgagcacgacatgctctctaagggtctactcggtggcgaggcgtggtcttcgtggcataaggaagactctattcatgtaggagtacgctgcatcgagatgctcattgagtcaaccggaatggttagcttacaccgccaaaatgctggcgtagtgggtgcagactctgagactatcgaactcgcacctgaatacgctgaggctatcgcaacccgtgcaggtgcgctggctggcatctctccgatgttccaaccttgcgtagttcctcctaagccgtggactggcattactggtggtggctattgggctgcggggcgcaaacccctgcagttagtacgtactcgcagtctggcggcgcttcgccgctatgaagaagtgtcgatgccggaggtcatcaaagcagtcaacattgcgcagaatacagcatggcgtattaacaagaaagttctcgacgtagcgaataccatcacccaatggcagcactgtccagtcgcggatgtgcctgcgatggatcgtggcgaaatgccagctcgtccgttggacatcgataccaacgagattgcacttaaagcgtggaagaaagaagcttccgcgttctaccgcaaagacaaagcacgcatgagccgtcgtctgtcgatggagtttatgttatctcaggcgaacaagtttgccaattatgaggctatctggtttccgcaaaacatggattggcgtgggcgcgtgtacgctgtcccgatgttcaatcctcagggcaacgatatgacgaaaggcctgctgacctttgcgcaggagaaacccattggtgaagacggcttctattggctcaagattcatggcgcaaatacagctggagtggataaagtaccgtttccacaacgcatcaaatttgttgaggataaccatacgaatattatggaatgcgcgaaagcaccgctggaaaacacttggtgggcggaacaggactcgccgttctgctttctggcgttctgctttgagtatgctggcgtcatcaatagtggtctgtcgtacaactgtagcttgcctctggcatttgatggtagttgctccggcctgcaacatttctcagcgatgttacgcgacgaaattggcggcaaagctgtgaatctcctcccatctgcggaataccaggatatttatcgtatcgtcagcgacaaagttaacgagatgctgaaacaagatctgattaacggtacctctaccaccgtggaaacggtgactgataaaaagacaggcgaaattacccaacgcacgaaatacgggaccaaagttatggcacagtggtggttagaacacggtgtgaatcgtggcgtcacgaaacgcccggttatgactttggtgtatgggagcaaagagtttggattccgcgatcaagtgctgagtgacaccattcaaccggcgatcgataacggcaagggtgacatgtttctgaatccgaatcaggctgctggttacatggcgaaactgatctggaacgcagtgtccgggaccgtagtcgcagcagttgaggcgatgaactggctgaaaagtgcggcgaaattacttgctgctgaagtgaaggatgagaagacggatacagttctgcgtggccgctgcgcagtacattgggtgactcccgacggcttccctgtgtggcaggaatacaagaagcctattcaaacgcgcttgaacctgatgttcctcggtcagttccgcttacagcctaccattaacaccaacaaagatagcgagattgatgcacgcaaacaggtgtctggtatcgctcctaactttgtacacagcctggacggtaaccaccttcgtatgactgtagtgtgggcacacgagaagtacggaatcgaatcttttgcactgattcacgactccttcggtaccattccggctgacgctgcgaacctgtttaaagcagtgcgcgaaactttcgttgacacatatgagtcttgtgatgtactggctgatttctacgaccagattgctgaccagttgcacgagtctcaacgcgacaaaatgccagcacttccggctaaaggtaagttgaacctccgtgacatcttaaaatcggacttcgcgttcgcg

SEQ ID NO: 1258 - protein, 890 aa, synthetic construct
  REGION 1..890: note = Variant of RNA polymerase
MHHHHHHMNTINIAKNDFSDIELAAIPFNTLADHYGERLASEQLALEHESYEMGEARFREMFERQLKAGEVADNAAAKPLITTLLPKMIARINDWFEEVKAKRGKRPTAFQFLQEIKPEAVAYITIKTTLACLTSADNTTVQAVASAIGRAIEDEARFGRIRDLEAKHFKKNVEEQLNKEVGHVAKKAFMQVVEHDMLSKGLLGGEAWSSWHKEDSIHVGVRCIEMLIESTGMVSLHRQNAGVVGADSETIELAPEYAEAIATRAGALAGISPMFQPCVVPPKPWTGITGGGYWAAGRKPLQLVRTRSLAALRRYEEVSMPEVIKAVNIAQNTAWRINKKVLDVANTITQWQHCPVADVPAMDRGEMPARPLDIDTNEIALKAWKKEASAFYRKDKARMSRRLSMEFMLSQANKFANYEAIWFPQNMDWRGRVYAVPMFNPQGNDMTKGLLTFAQEKPIGEDGFYWLKIHGANTAGVDKVPFPQRIKFVEDNHTNIMECAKAPLENTWWAEQDSPFCFLAFCFEYAGVINSGLSYNCSLPLAFDGSCSGLQHFSAMLRDEIGGKAVNLLPSAEYQDIYRIVSDKVNEMLKQDLINGTSTTVETVTDKKTGEITQRTKYGTKVMAQWWLEHGVNRGVTKRPVMTLVYGSKEFGFRDQVLSDTIQPAIDNGKGDMFLNPNQAAGYMAKLIWNAVSGTVVAAVEAMNWLKSAAKLLAAEVKDEKTDTVLRGRCAVHWVTPDGFPVWQEYKKPIQTRLNLMFLGQFRLQPTINTNKDSEIDARKQVSGIAPNFVHSLDGNHLRMTVVWAHEKYGIESFALIHDSFGTIPADAANLFKAVRETFVDTYESCDVLADFYDQIADQLHESQRDKMPALPAKGKLNLRDILKSDFAFA

SEQ ID NO: 1259 - DNA, 2670 bp, synthetic construct
  misc_feature 1..2670: note = Variant of RNA polymerase
  source 1..2670: mol_type = other DNA
atgcaccatcaccatcaccatatgaacacgattaacattgctaagaacgacttctctgacatcgaactggctgctatcccgttcaacactctggctgaccattacggtgagcgtttagctagtgaacagttggcccttgagcatgagtcttacgagatgggtgaagcacgcttccgcaagatgtttgagcgtcaacttaaagctggtgaggttgcggataacgctgccgccaagcctctcatcactaccctactccctaagatgattgcacgcatcaacgactggtttgaggaagtgaaagctaagcgcggcaagcgcccgacagccttccagttcctgcaagaaatcaagccggaagccgtagcgtacatcaccattaagaccactctggcttgcctaaccagcgcagacaatacaaccgttcaggctgtagcaagcgcaatcggtcgggccattgaggacgaggctcgcttcggtcgtatccgtgaccttgaagctaagcacttcaagaagaacgttgaggaacaactcaacaagaaggtagggcacgtcgcgaagaaagcatttatgcaagttgtcgagcacgacatgctctctaagggtctactcggtggcgaggcgtggtcttcgtggcataaggaagactctattcatgtaggagtacgctgcatcgagatgctcattgagtcaaccggaatggttagcttacaccgccaaaatgctggcgtagtgggtgcagactctgagactatcgaactcgcacctgaatacgctgaggctatcgcaacccgtgcaggtgcgctggctggcatctctccgatgttccaaccttgcgtagttcctcctaagccgtggactggcattactggtggtggctattgggctgcggggcgcaaacccctgcagttagtacgtactcgcagtctggcggcgcttcgccgctatgaagaagtgtcgatgccggaggtcatcaaagcagtcaacattgcgcagaatacagcatggcgtattaacaagaaagttctcgacgtagcgaataccatcacccaatggcagcactgtccagtcgcggatgtgcctgcgatggatcgtggcgaaatgccagctcgtccgttggacatcgataccaacgagattgcacttaaagcgtggaagaaagaagcttccgcgttctaccgcaaagacaaagcacgcatgagccgtcgtctgtcgatggagtttatgttatctcaggcgaacaagtttgcgaattatgaggctatctggtttccgcaaaacatggattggcgtgggcgcgtgtacgctgtcccgatgttcaatcctcagggcaacgatatgacgaaaggcctgctgacctttgcgcaggagaaacccattggtgaagacggcttctattggctcaagattcatggcgcaaatacagctggaggggataaagtaccgtttccacaacgcatcaaatttgttgaggataaccatacgaatattatggaatgcgcgaaagcaccgctggaaaacacttggtgggcggaacaggactcgccgttctgctttctggcgttctgctttgagtatgctggcgtcatcaatagtggtctgtcgtacaactgtagcttgcctctggcatttgatggtagttgctccggcctgcaacatttctcagcgatgttacgcgacgaaattggcggcaaagctgtgaatctcctcccatctgcggaataccaggatatttatcgtatcgtcagcgacaaagttaacgagatgctgaaacaagatctgattaacggtacctctaccaccgtggaaacggtgactgataaaaagacaggcgaaattacccaacgcacgaaatacgggaccaaagttatggcacagtggtggttagaacacggtgtgaatcgtggcgtcacgaaacgcccggttatgactttggtgtatgggagcaaagagtttggattccgcgatcaagtgctgagtgacaccattcaaccggcgatcgataacggcaagggtgacatgtttctgaatccgaatcaggctgctggttacatggcgaaactgatctggaacgcagtgtccgggaccgtagtcgcagcagttgaggcgatgaactggctgaaaagtgcggcgaaattacttgctgctgaagtgaaggatgagaagacggatacagttctgcgtggccgctgcgcagtacattgggtgactcccgacggcttccctgtgtggcaggaatacaagaagcctattcaaacgcgcttgaacctgatgttcctcggtcagttccgcttacagcctaccattaacaccaacaaagatagcgagattgatgcacgcaaacaggtgtctggtatcgctcctaactttgtacacagcctgaacggtaaccaccttcgtatgactgtagtgtgggcacacgagaagtacggaatcgaatcttttgcactgattcacgactccttcggtaccattccggctgacgctgcgaacctgtttaaagcagtgcgcgaaactttcgttgacacatatgagtcttgtgatgtactggctgatttctacgaccagattgctgaccagttgcacgagtctcaacgcgacaaaatgccagcacttccggctaaaggtaagttgaacctccgtgacatcttaaaatcggacttcgcgttcgcg

SEQ ID NO: 1260 - protein, 890 aa, synthetic construct
  REGION 1..890: note = Variant of RNA polymerase
MHHHHHHMNTINIAKNDFSDIELAAIPFNTLADHYGERLASEQLALEHESYEMGEARFRKMFERQLKAGEVADNAAAKPLITTLLPKMIARINDWFEEVKAKRGKRPTAFQFLQEIKPEAVAYITIKTTLACLTSADNTTVQAVASAIGRAIEDEARFGRIRDLEAKHFKKNVEEQLNKKVGHVAKKAFMQVVEHDMLSKGLLGGEAWSSWHKEDSIHVGVRCIEMLIESTGMVSLHRQNAGVVGADSETIELAPEYAEAIATRAGALAGISPMFQPCVVPPKPWTGITGGGYWAAGRKPLQLVRTRSLAALRRYEEVSMPEVIKAVNIAQNTAWRINKKVLDVANTITQWQHCPVADVPAMDRGEMPARPLDIDTNEIALKAWKKEASAFYRKDKARMSRRLSMEFMLSQANKFANYEAIWFPQNMDWRGRVYAVPMFNPQGNDMTKGLLTFAQEKPIGEDGFYWLKIHGANTAGGDKVPFPQRIKFVEDNHTNIMECAKAPLENTWWAEQDSPFCFLAFCFEYAGVINSGLSYNCSLPLAFDGSCSGLQHFSAMLRDEIGGKAVNLLPSAEYQDIYRIVSDKVNEMLKQDLINGTSTTVETVTDKKTGEITQRTKYGTKVMAQWWLEHGVNRGVTKRPVMTLVYGSKEFGFRDQVLSDTIQPAIDNGKGDMFLNPNQAAGYMAKLIWNAVSGTVVAAVEAMNWLKSAAKLLAAEVKDEKTDTVLRGRCAVHWVTPDGFPVWQEYKKPIQTRLNLMFLGQFRLQPTINTNKDSEIDARKQVSGIAPNFVHSLNGNHLRMTVVWAHEKYGIESFALIHDSFGTIPADAANLFKAVRETFVDTYESCDVLADFYDQIADQLHESQRDKMPALPAKGKLNLRDILKSDFAFA

SEQ ID NO: 1261 - DNA, 2670 bp, synthetic construct
  misc_feature 1..2670: note = Variant of RNA polymerase
  source 1..2670: mol_type = other DNA
atgcaccatcaccatcaccatatgaacacgattaacattgctaagaacgacttctctgacatcgaactggctgctatcccgttcaacactctggctgaccattacggtgagcgtttagctagtgaacagttggcccttgagcatgagtcttacgagatgggtgaagcacgcttccgcaagatgtttgagcgtcaacttaaagctggtgaggttgcggataacgctgccgccaagcctctcatcactaccctactccctaagatgattgcacgcatcaacgactggtttgaggaagtgaaagctaagcgcggcaagcgcccgacagccttccagttcctgcaagaaatcaagccggaagccgtagcgtacatcaccattaagaccactctggcttgcctaaccagcgcagacaatacaaccgttcaggctgtagcaagcgcaatcggtcgggccattgaggacgaggctcgcttcggtcgtatccgtgaccttgaagctaagcacttcaagaagaacgttgaggaacaactcaacaagcgtgtagggcacgtcaacaagaaagcatttatgcaagttgtcgagcacgacatgctctctaagggtctactcggtggcgaggcgtggtcttcgtggcataaggaagactctattcatgtaggagtacgctgcatcgagatgctcattgagtcaaccggaatggttagcttacaccgccaaaatgctggcgtagtgggtgcagactctgagactatcgaactcgcacctgaatacgctgaggctatcgcaacccgtgcaggtgcgctggctggcatctctccgatgttccaaccttgcgtagttcctcctaagccgtggactggcattactggtggtggctattgggctgcggggcgcaaacccctgcagttagtacgtactcgcagtctggcggcgcttcgccgctatgaagaagtgtcgatgccggaggtcatcaaagcagtcaacattgcgcagaatacagcatggcgtattaacaagaaagttctcgacgtagcgaataccatcacccaatggcagcactgtccagtcgcggatgtgcctgcgatggatcgtggcgaaatgccagctcgtccgttggacatcgataccaacgagattgcacttaaagcgtggaagaaagaagcttccgcgttctaccgcaaagacaaagcacgcatgagccgtcgtctgtcgatggagtttatgttatctcaggcgaacaagtttgccaattatgaggctatctggtttccgcaaaacatggattggcgtgggcgcgtgtacgctgtcccgatgttcaatcctcagggcaacgatatgacgaaaggcctgctgacctttgcgcaggagaaacccattggtgaagacggcttctattggctcaagattcatggcgcaaatacagctggagtggataaagtaccgtttccacaacgcatcaaatttgttgaggataaccatacgaatattatggaatgcgcgaaagcaccgctggaaaacacttggtgggcggaacaggactcgccgttctgctttctggcgttctgctttgagtatgctggcgtcatcaatagtggtctgtcgtacaactgtagcttgcctctggcatttgatggtagttgctccggcctgcaacatttctcagcgatgttacgcgacgaaattggcggcaaagctgtgaatctcctcccatctgcggaataccaggatatttatcgtatcgtcagcgacaaagttaacgagatgctgaaacaagatctgattaacggtacctctaccaccgtggaaacggtgactgataaaaagacaggcgaaattacccaacgcacgaaatacgggaccaaagttatggcacagtggtggttagaacacggtgtgaatcgtggcgtcacgaaacgcccggttatgactttggtgtatgggagcaaagagtttggattccgcgatcaagtgctgagtgacaccattcaaccggcgatcgataacggcaagggtgacatgtttctgaatccgaatcaggctgctggttacatggcgaaactgatctggaacgcagtgtccgggaccgtagtcgcagcagttgaggcgatgaactggctgaaaagtgcggcgaaattacttgctgctgaagtgaaggatgagaagacggatacagttctgcgtggccgctgcgcagtacattgggtgactcccgacggcttccctgtgtggcaggaatacaagaagcctattcaaacgcgcttgaacctgatgttcctcggtcagttccgcttacagcctaccattaacaccaacaaagatagcgagattgatgcacgcaaacaggtgtctggtatcgctcctaactttgtacacagcctgaacggtaaccaccttcgtatgactgtagtgtgggcacacgagaagtacggaatcgaatcttttgcactgattcacgactccttcggtaccattccggctgacgctgcgaacctgtttaaagcagtgcgcgaaactttcgttgacacatatgagtcttgtgatgtactggctgatttctacgaccagattgttgaccagttgcacgagtctcaacgcgacaaaatgccagcacttccggctaaaggtaagttgaacctccgtgacatcttaaaatcggacttcgcgttcgcg

SEQ ID NO: 1262 - protein, 890 aa, synthetic construct
  REGION 1..890: note = Variant of RNA polymerase
MHHHHHHMNTINIAKNDFSDIELAAIPFNTLADHYGERLASEQLALEHESYEMGEARFRKMFERQLKAGEVADNAAAKPLITTLLPKMIARINDWFEEVKAKRGKRPTAFQFLQEIKPEAVAYITIKTTLACLTSADNTTVQAVASAIGRAIEDEARFGRIRDLEAKHFKKNVEEQLNKRVGHVNKKAFMQVVEHDMLSKGLLGGEAWSSWHKEDSIHVGVRCIEMLIESTGMVSLHRQNAGVVGADSETIELAPEYAEAIATRAGALAGISPMFQPCVVPPKPWTGITGGGYWAAGRKPLQLVRTRSLAALRRYEEVSMPEVIKAVNIAQNTAWRINKKVLDVANTITQWQHCPVADVPAMDRGEMPARPLDIDTNEIALKAWKKEASAFYRKDKARMSRRLSMEFMLSQANKFANYEAIWFPQNMDWRGRVYAVPMFNPQGNDMTKGLLTFAQEKPIGEDGFYWLKIHGANTAGVDKVPFPQRIKFVEDNHTNIMECAKAPLENTWWAEQDSPFCFLAFCFEYAGVINSGLSYNCSLPLAFDGSCSGLQHFSAMLRDEIGGKAVNLLPSAEYQDIYRIVSDKVNEMLKQDLINGTSTTVETVTDKKTGEITQRTKYGTKVMAQWWLEHGVNRGVTKRPVMTLVYGSKEFGFRDQVLSDTIQPAIDNGKGDMFLNPNQAAGYMAKLIWNAVSGTVVAAVEAMNWLKSAAKLLAAEVKDEKTDTVLRGRCAVHWVTPDGFPVWQEYKKPIQTRLNLMFLGQFRLQPTINTNKDSEIDARKQVSGIAPNFVHSLNGNHLRMTVVWAHEKYGIESFALIHDSFGTIPADAANLFKAVRETFVDTYESCDVLADFYDQIVDQLHESQRDKMPALPAKGKLNLRDILKSDFAFA

SEQ ID NO: 1263 - DNA, 2670 bp, synthetic construct
  misc_feature 1..2670: note = Variant of RNA polymerase
  source 1..2670: mol_type = other DNA
atgcaccatcaccatcaccatatgaacacgattaacattgctaagaacgacttctctgacatcgaactggctgctatcccgttcaacactctggctgaccattacggtgagcgtttagctagtgaacagttggcccttgagcatgagtcttacgagatgggtgaagcacgcttccgcaagatgtttgagcgtcaacttaaagctggtgaggttgcggataacgctgccgccaagcctctcatcactaccctactccctaagatgattgcacgcatcaacgactggtttgaggaagtgaaagctaagcgcggcaagcgcccgacagccttccagttcctgcaagaaatcaagccggaagccgtagcgtacatcaccattaagaccactctggcttgcctaaccagcgaagacaatacaaccgttcaggctgtagcaagcgcaatcggtcgggccattgaggacgaggctcgcttcggtcgtatccgtgaccttgaagctaagcacttcaagaagaacgttgaggaacaactcaacaagcgcgtagggcacgtctacaagaaagcatttatgcaagttgtcgagcacgacatgctctctaagggtctactcggtggcgaggcgtggtcttcgtggcataaggaagactctattcatgtaggagtacgctgcatcgagatgctcattgagtcaaccggaatggttagcttacaccgccaaaatgctggcgtagtgggtgcagactctgagactatcgaactcgcacctgaatacgctgaggctatcgcaacccgtgcaggtgcgctggctggcatctctccgatgttccaaccttgcgtagttcctcctaagccgtggactggcattactggtggtggctattgggctgcggggcgcaaacccctgcagttagtacgtactcgcagtctggcggcgcttcgccgctatgaagaagtgtcgatgccggaggtcatcaaagcagtcaacattgcgcagaatacagcatggcgtattaacaagaaagttctcgacgtagcgaataccatcacccaatggcagcactgtccagtcgcggatgtgcctgcgatggatcgtggcgaaatgccagctcgtccgttggacatcgataccaacgagattgcacttaaagcgtggaagaaagaagcttccgcgttctaccgcaaagacaaagcacgcatgagccgtcgtctgtcgatggagtttatgttatctcaggcgaacaagtttgccaattatgaggctatctggtttccgcaaaacatggattggcgtgggcgcgtgtacgctgtcccgatgttcaatcctcagggcaacgatatgacgaaaggcctgctgacctttgcgcaggagaaacccattggtgaagacggcttctattggctcaagattcatggcgcaaatacagctggagtggataaagtaccgtttccacaacgcatcaaatttgttgaggataaccatacgaatattatggaatgcgcgaaagcaccgctggaaaacacttggtgggcggaacaggactcgccgttctgctttctggcgttctgctttgagtatgctggcgtcatcaatagtggtctgtcgtacaactgtagcttgcctctggcatttgatggtagttgctccggcctgcaacatttctcagcgatgttacgcgacgaaattggcggcaaagctgtgaatctcctcccatctgcggaataccaggatatttatcgtatcgtcagcgacaaagttaacgagatgctgaaacaagatctgattaacggtacctctaccaccgtggaaacggtgactgataaaaagacaggcgaaattacccaacgcacgaaatacgggaccaaagttatggcacagtggtggttagaacacggtgtgaatcgtggcgtcacgaaacgcccggttatgactttggtgtatgggagcaaagagtttggattccgcgatcaagtgctgagtgacaccattcaaccggcgatcgataacggcaagggtgacatgtttctgaatccgaatcaggctgctggttacatggcgaaactgatctggaacgcagtgtccgggaccgtagtcgcagcagttgaggcgatgaactggctgaaaagtgcggcgaaattacttgctgctgaagtgaaggatgagaagacggatacagttctgcgtggccgctgcgcagtacattgggtgactcccgacggcttccctgtgtggcaggaatacaagaagcctattcaaacgcgcttgaacctgatgttcctcggtcagttccgcttacagcctaccattaacaccaacaaagatagcgagattgatgcacgcaaacaggtgtctggtatcgctcctaactttgtacacagcctggacggtaaccaccttcgtatgactgtagtgtgggcacacgagaagtacggaatcgaatcttttgcactgattcacgactccttcggtaccattccggctgacgctgcgaacctgtttaaagcagtgcgcgaaactttcgttgacacatatgagtcttgtgatgtactggctgatttctacgaccagattgctgaccagttgcacgagtctcaacgcgacaaaatgccagcacttccggctaaaggtaagttgaacctccgtgacatcttaaaatcggacttcgcgttcgcg

SEQ ID NO: 1264 - protein, 890 aa, synthetic construct
  REGION 1..890: note = Variant of RNA polymerase
MHHHHHHMNTINIAKNDFSDIELAAIPFNTLADHYGERLASEQLALEHESYEMGEARFRKMFERQLKAGEVADNAAAKPLITTLLPKMIARINDWFEEVKAKRGKRPTAFQFLQEIKPEAVAYITIKTTLACLTSEDNTTVQAVASAIGRAIEDEARFGRIRDLEAKHFKKNVEEQLNKRVGHVYKKAFMQVVEHDMLSKGLLGGEAWSSWHKEDSIHVGVRCIEMLIESTGMVSLHRQNAGVVGADSETIELAPEYAEAIATRAGALAGISPMFQPCVVPPKPWTGITGGGYWAAGRKPLQLVRTRSLAALRRYEEVSMPEVIKAVNIAQNTAWRINKKVLDVANTITQWQHCPVADVPAMDRGEMPARPLDIDTNEIALKAWKKEASAFYRKDKARMSRRLSMEFMLSQANKFANYEAIWFPQNMDWRGRVYAVPMFNPQGNDMTKGLLTFAQEKPIGEDGFYWLKIHGANTAGVDKVPFPQRIKFVEDNHTNIMECAKAPLENTWWAEQDSPFCFLAFCFEYAGVINSGLSYNCSLPLAFDGSCSGLQHFSAMLRDEIGGKAVNLLPSAEYQDIYRIVSDKVNEMLKQDLINGTSTTVETVTDKKTGEITQRTKYGTKVMAQWWLEHGVNRGVTKRPVMTLVYGSKEFGFRDQVLSDTIQPAIDNGKGDMFLNPNQAAGYMAKLIWNAVSGTVVAAVEAMNWLKSAAKLLAAEVKDEKTDTVLRGRCAVHWVTPDGFPVWQEYKKPIQTRLNLMFLGQFRLQPTINTNKDSEIDARKQVSGIAPNFVHSLDGNHLRMTVVWAHEKYGIESFALIHDSFGTIPADAANLFKAVRETFVDTYESCDVLADFYDQIADQLHESQRDKMPALPAKGKLNLRDILKSDFAFA

SEQ ID NO: 1265 - DNA, 2670 bp, synthetic construct
  misc_feature 1..2670: note = Variant of RNA polymerase
  source 1..2670: mol_type = other DNA
atgcaccatcaccatcaccatatgaacacgattaacattgctaagaacgacttctctgacatcgaactggctgctatcccgttcaacactctggctgaccattacggtgagcgtttagctagtgaacagttggcccttgagcatgagtcttacgagatgggtgaagcacgcttccgcgagatgtttgagcgtcaacttaaagctggtgaggttgcggataacgctgccgccaagcctctcatcactaccctactccctaagatgattgcacgcatcaacgactggtttgaggaagtgaaagctaagcgcggcaagcgcccgacagccttccagttcctgcaagaaatcaagccggaagccgtagcgtacatcaccattaagaccactctggcttgcctaaccagcgcagacaatacaaccgttcaggctgtagcaagcgcaatcggtcgggccattgaggacgaggctcgcttcggtcgtatccgtgaccttgaagctaagcacttcaagaagaacgttgaggaacaactcaacaagcgtgtagggcacgtcaacaagaaagcatttatgcaagttgtcgagcacgacatgctctctaagggtctactcggtggcgaggcgtggtcttcgtggcataaggaagactctattcatgtaggagtacgctgcatcgagatgctcattgagtcaaccggaatggttagcttacaccgccaaaatgctggcgtagtgggtgcagactctgagactatcgaactcgcacctgaatacgctgaggctatcgcaacccgtgcaggtgcgctggctggcatctctccgatgttccaaccttgcgtagttcctcctaagccgtggactggcattactggtggtggctattgggctgcggggcgcaaacccctgcagttagtacgtactcgcagtctggcggcgcttcgccgctatgaagaagtgtcgatgccggaggtcatcaaagcagtcaacattgcgcagaatacagcatggcgtattaacaagaaagttctcgacgtagcgaataccatcacccaatggcagcactgtccagtcgcggatgtgcctgcgatggatcgtggcgaaatgccagctcgtccgttggacatcgataccaacgagattgcacttaaagcgtggaagaaagaagcttccgcgttctaccgcaaagacaaagcacgcatgagccgtcgtctgtcgatggagtttatgttatctcaggcgaacaagtttgcgaattatgaggcaatctggtttccgcaaaacatggattggcgtgggcgcgtgtacgctgtcccgatgttcaatcctcagggcaacgatatgacgaaaggcctgctgacctttgcgcaggagaaacccattggtgaagacggcttctattggctcaagattcatggcgcaaatacagctggagtggataaagtaccgtttccacaacgcatcaaatttgttgaggataaccatacgaatattatggaatgcgcgaaagcaccgctggaaaacacttggtgggcggaacaggactcgccgttctgctttctggcgttctgctttgagtatgctggcgtcatcaatagtggtctgtcgtacaactgtagcttgcctctggcatttgatggtagttgctccggcctgcaacatttctcagcgatgttacgcgacgaaattggcggcaaagctgtgaatctcctcccatctgcggaataccaggatatttatcgtatcgtcagcgacaaagttaacgagatgctgaaacaagatctgattaacggtacctctaccaccgtggaaacggtgactgataaaaagacaggcgaaattacccaacgcacgaaatacgggaccaaagttatggcacagtggtggttagaacacggtgtgaatcgtggcgtcacgaaacgcccggttatgactttggtgtatgggagcaaagagtttggattccgcgatcaagtgctgagtgacaccattcaaccggcgatcgataacggcaagggtgacatgtttctgaatccgaatcaggctgctggttacatggcgaaactgatctggaacgcagtgtccgggaccgtagtcgcagcagttgaggcgatgaactggctgaaaagtgcggcgaaattacttgctgctgaagtgaaggatgagaagacggatacagttctgcgtggccgctgcgcagtacattgggtgactcccgacggcttccctgtgtggcaggaatacaagaagcctattcaaacgcgcttgaacctgatgttcctcggtcagttccgcttacagcctaccattaacaccaacaaagatagcgagattgatgcacgcaaacaggtgtctggtatcgctcctaactttgtacacagcctggacggtaaccaccttcgtatgactgtagtgtgggcacacgagaagtacggaatcgaatcttttgcactgattcacgactccttcggtaccattccggctgacgctgcgaacctgtttaaagcagtgcgcgaaactttcgttgacacatatgagtcttgtgatgtactggctgatttctacgaccagattgttgaccagttgcacgagtctcaacgcgacaaaatgccagcacttccggctaaaggtaagttgaacctccgtgacatcttaaaatcggacttcgcgttcgcg

SEQ ID NO: 1266 - protein, 890 aa, synthetic construct
  REGION 1..890: note = Variant of RNA polymerase
MHHHHHHMNTINIAKNDFSDIELAAIPFNTLADHYGERLASEQLALEHESYEMGEARFREMFERQLKAGEVADNAAAKPLITTLLPKMIARINDWFEEVKAKRGKRPTAFQFLQEIKPEAVAYITIKTTLACLTSADNTTVQAVASAIGRAIEDEARFGRIRDLEAKHFKKNVEEQLNKRVGHVNKKAFMQVVEHDMLSKGLLGGEAWSSWHKEDSIHVGVRCIEMLIESTGMVSLHRQNAGVVGADSETIELAPEYAEAIATRAGALAGISPMFQPCVVPPKPWTGITGGGYWAAGRKPLQLVRTRSLAALRRYEEVSMPEVIKAVNIAQNTAWRINKKVLDVANTITQWQHCPVADVPAMDRGEMPARPLDIDTNEIALKAWKKEASAFYRKDKARMSRRLSMEFMLSQANKFANYEAIWFPQNMDWRGRVYAVPMFNPQGNDMTKGLLTFAQEKPIGEDGFYWLKIHGANTAGVDKVPFPQRIKFVEDNHTNIMECAKAPLENTWWAEQDSPFCFLAFCFEYAGVINSGLSYNCSLPLAFDGSCSGLQHFSAMLRDEIGGKAVNLLPSAEYQDIYRIVSDKVNEMLKQDLINGTSTTVETVTDKKTGEITQRTKYGTKVMAQWWLEHGVNRGVTKRPVMTLVYGSKEFGFRDQVLSDTIQPAIDNGKGDMFLNPNQAAGYMAKLIWNAVSGTVVAAVEAMNWLKSAAKLLAAEVKDEKTDTVLRGRCAVHWVTPDGFPVWQEYKKPIQTRLNLMFLGQFRLQPTINTNKDSEIDARKQVSGIAPNFVHSLDGNHLRMTVVWAHEKYGIESFALIHDSFGTIPADAANLFKAVRETFVDTYESCDVLADFYDQIVDQLHESQRDKMPALPAKGKLNLRDILKSDFAFA

SEQ ID NO: 1267 - DNA, 2670 bp, synthetic construct
  misc_feature 1..2670: note = Variant of RNA polymerase
  source 1..2670: mol_type = other DNA
atgcaccatcaccatcaccatatgaacacgattaacattgctaagaacgacttctctgacatcgaactggctgctatcccgttcaacactctggctgaccattacggtgagcgtttagctcgtgaacagttggcccttgagcatgagtcttacgagatgggtgaagcacgcttccgcaagatgtttgagcgtcaacttaaagctggtgaggttgcggataacgctgccgccaagcctctcatcactaccctactccctaagatgattgcacgcatcaacgactggtttgaggaagtgaaagctaagcgcggcaagcgcccgacagccttccagttcctgcaagaaatcaagccggaagccgtagcgtacatcaccattaagaccactctggcttgcctaaccagtgcggacaatacaaccgttcaggctgtagcaagcgcaatcggtcgggccattgaggacgaggctcgcttcggtcgtatccgtgaccttgaagctaagcacttcaagaagaacgttgaggaacaactcaacaagcgtgtagggcacgtcgcgaagaaagcatttatgcaagttgtcgagcacgacatgctctctaagggtctactcggtggcgaggcgtggtcttcgtggcataaggaagactctattcatgtaggagtacgctgcatcgagatgctcattgagtcaaccggaatggttagcttacaccgccaaaatgctggcgtagtgggtgcagactctgagactatcgaactcgcacctgaatacgctgaggctatcgcaacccgtgcaggtgcgctggctggcatctctccgatgttccaaccttgcgtagttcctcctaagccgtggactggcattactggtggtggctattgggctgcggggcgcaaacccctgcagttagtacgtactcgcagtctggcggcgcttcgccgctatgaagaagtgtcgatgccggaggtcatcaaagcagtcaacattgcgcagaatacagcatggcgtattaacaagaaagttctcgacgtagcgaataccatcacccaatggcagcactgtccagtcgcggatgtgcctgcgatggatcgtggcgaaatgccagctcgtccgttggacatcgataccaacgagattgcacttaaagcgtggaagaaagaagcttccgcgttctaccgcaaagacaaagcacgcatgagccgtcgtctgtcgatggagtttatgttatctcaggcgaacaagtttggcaattatgaggttatctggtttccgcaaaacatggattggcgtgggcgcgtgtacgctgtcccgatgttcaatcctcagggcaacgatatgacgaaaggcctgctgacctttgcgcaggagaaacccattggtgaagacggcttctattggctcaagattcatggcgcaaatacagctggagtggataaagtaccgtttccacaacgcatcaaatttgttgaggataaccatacgaatattatggaatgcgcgaaagcaccgctggaaaacacttggtgggcggaacaggactcgccgttctgctttctggcgttctgctttgagtatgctggcgtcatcaatagtggtctgtcgtacaactgtagcttgcctctggcatttgatggtagttgctccggcctgcaacatttctcagcgatgttacgcgacgaaattggcggcaaagctgtgaatctcctcccatctgcggaataccaggatatttatcgtatcgtcagcgacaaagttaacgagatgctgaaacaagatctgattaacggtacctctaccaccgtggaaacggtgactgataaaaagacaggcgaaattacccaacgcacgaaatacgggaccaaagttatggcacagtggtggttagaacacggtgtgaatcgtggcgtcacgaaacgcccggttatgactttggtgtatgggagcaaagagtttggattccgcgatcaagtgctgagtgacaccattcaaccggcgatcgataacggcaagggtgacatgtttctgaatccgaatcaggctgctggttacatggcgaaactgatctggaacgcagtgtccgggaccgtagtcgcagcagttgaggcgatgaactggctgaaaagtgcggcgaaattacttgctgctgaagtgaaggatgagaagacggatacagttctgcgtggccgctgcgcagtacattgggtgactcccgacggcttccctgtgtggcaggaatacaagaagcctattcaaacgcgcttgaacctgatgttcctcggtcagttccgcttacagcctaccattaacaccaacaaagatagcgagattgatgcacgcaaacaggtgtctggtatcgctcctaactttgtacacagcctggacggtaaccaccttcgtatgactgtagtgtgggcacacgagaagtacggaatcgaatcttttgcactgattcacgactccttcggtaccattccggctgacgctgcgaacctgcgcaaagcagtgcgcgaaactttcgttgacacatatgagtcttgtgatgtactggctgatttctacgaccagattgctgaccagttgcacgagtctcaacgcgacaaaatgccagcacttccggctaaaggtaagttgaacctccgtgacatcttaaaatcggacttcgcgttcgcg

SEQ ID NO: 1268 - protein, 890 aa, synthetic construct
  REGION 1..890: note = Variant of RNA polymerase
MHHHHHHMNTINIAKNDFSDIELAAIPFNTLADHYGERLAREQLALEHESYEMGEARFRKMFERQLKAGEVADNAAAKPLITTLLPKMIARINDWFEEVKAKRGKRPTAFQFLQEIKPEAVAYITIKTTLACLTSADNTTVQAVASAIGRAIEDEARFGRIRDLEAKHFKKNVEEQLNKRVGHVAKKAFMQVVEHDMLSKGLLGGEAWSSWHKEDSIHVGVRCIEMLIESTGMVSLHRQNAGVVGADSETIELAPEYAEAIATRAGALAGISPMFQPCVVPPKPWTGITGGGYWAAGRKPLQLVRTRSLAALRRYEEVSMPEVIKAVNIAQNTAWRINKKVLDVANTITQWQHCPVADVPAMDRGEMPARPLDIDTNEIALKAWKKEASAFYRKDKARMSRRLSMEFMLSQANKFGNYEVIWFPQNMDWRGRVYAVPMFNPQGNDMTKGLLTFAQEKPIGEDGFYWLKIHGANTAGVDKVPFPQRIKFVEDNHTNIMECAKAPLENTWWAEQDSPFCFLAFCFEYAGVINSGLSYNCSLPLAFDGSCSGLQHFSAMLRDEIGGKAVNLLPSAEYQDIYRIVSDKVNEMLKQDLINGTSTTVETVTDKKTGEITQRTKYGTKVMAQWWLEHGVNRGVTKRPVMTLVYGSKEFGFRDQVLSDTIQPAIDNGKGDMFLNPNQAAGYMAKLIWNAVSGTVVAAVEAMNWLKSAAKLLAAEVKDEKTDTVLRGRCAVHWVTPDGFPVWQEYKKPIQTRLNLMFLGQFRLQPTINTNKDSEIDARKQVSGIAPNFVHSLDGNHLRMTVVWAHEKYGIESFALIHDSFGTIPADAANLRKAVRETFVDTYESCDVLADFYDQIADQLHESQRDKMPALPAKGKLNLRDILKSDFAFA

SEQ ID NO: 1269 - DNA, 2670 bp, synthetic construct
  misc_feature 1..2670: note = Variant of RNA polymerase
  source 1..2670: mol_type = other DNA
atgcaccatcaccatcaccatatgaacacgattaacattgctaagaacgacttctctgacatcgaactggctgctatcccgttcaacactctggctgaccattacggtgagcgtttagctcgtgaacagttggcccttgagcatgagtcttacgagatgggtgaagcacgcttccgcgagatgtttgagcgtcaacttaaagctggtgaggttgcggataacgctgccgccaagcctctcatcactaccctactccctaagatgattgcacgcatcaacgactggtttgaggaagtgaaagctaagcgcggcaagcgcccgacagccttccagttcctgcaagaaatcaagccggaagccgtagcgtacatcaccattaagaccactctggcttgcctaacccgcgcagacaatacaaccgttcaggctgtagcaagcgcaatcggtcgggccattgaggacgaggctcgcttcggtcgtatccgtgaccttgaagctaagcacttcaagaagaacgttgaggaacaactcaacaagaaggtagggcacgtcgcgaagaaagcatttatgcaagttgtcgagcacgacatgctctctaagggtctactcggtggcgaggcgtggtcttcgtggcataaggaagactctattcatgtaggagtacgctgcatcgagatgctcattgagtcaaccggaatggttagcttacaccgccaaaatgctggcgtagtgggtgcagactctgagactatcgaactcgcacctgaatacgctgaggctatcgcaacccgtgcaggtgcgctggctggcatctctccgatgttccaaccttgcgtagttcctcctaagccgtggactggcattactggtggtggctattgggctgcggggcgcaaacccctgcagttagtacgtactcgcagtctggcggcgcttcgccgctatgaagaagtgtcgatgccggaggtcatcaaagcagtcaacattgcgcagaatacagcatggcgtattaacaagaaagttctcgacgtagcgaataccatcacccaatggcagcactgtccagtcgcggatgtgcctgcgatggatcgtggcgaaatgccagctcgtccgttggacatcgataccaacgagattgcacttaaagcgtggaagaaagaagcttccgcgttctaccgcaaagacaaagcacgcatgagccgtcgtctgtcgatggagtttatgttatctcaggcgaacaagtttgcgaattatgaggcaatctggtttccgcaaaacatggattggcgtgggcgcgtgtacgctgtcccgatgttcaatcctcagggcaacgatatgacgaaaggcctgctgacctttgcgcaggagaaacccattggtgaagacggcttctattggctcaagattcatggcgcaaatacagctggagtggataaagtaccgtttccacaacgcatcaaatttgttgaggataaccatacgaatattatggaatgcgcgaaagcaccgctggaaaacacttggtgggcggaacaggactcgccgttctgctttctggcgttctgctttgagtatgctggcgtcatcaatagtggtctgtcgtacaactgtagcttgcctctggcatttgatggtagttgctccggcctgcaacatttctcagcgatgttacgcgacgaaattggcggcaaagctgtgaatctcctcccatctgcggaataccaggatatttatcgtatcgtcagcgacaaagttaacgagatgctgaaacaagatctgattaacggtacctctaccaccgtggaaacggtgactgataaaaagacaggcgaaattacccaacgcacgaaatacgggaccaaagttatggcacagtggtggttagaacacggtgtgaatcgtggcgtcacgaaacgcccggttatgactttggtgtatgggagcaaagagtttggattccgcgatcaagtgctgagtgacaccattcaaccggcgatcgataacggcaagggtgacatgtttctgaatccgaatcaggctgctggttacatggcgaaactgatctggaacgcagtgtccgggaccgtagtcgcagcagttgaggcgatgaactggctgaaaagtgcggcgaaattacttgctgctgaagtgaaggatgagaagacggatacagttctgcgtggccgctgcgcagtacattgggtgactcccgacggcttccctgtgtggcaggaatacaagaagcctattcaaacgcgcttgaacctgatgttcctcggtcagttccgcttacagcctaccattaacaccaacaaagatagcgagattgatgcacgcaaacaggtgtctggtatcgctcctaactttgtacacagcctgaacggtaaccaccttcgtatgactgtagtgtgggcacacgagaagtacggaatcgaatcttttgcactgattcacgactccttcggtaccattccggctgacgctgcgaacctgtttaaagcagtgcgcgaaactttcgttgacacatatgagtcttgtgatgtactggctgatttctacgaccagattgctgaccagttgcacgagtctcaacgcgacaaaatgccagcacttccggctaaaggtaagttgaacctccgtgacatcttaaaatcggacttcgcgttcgcg

SEQ ID NO: 1270 - protein, 890 aa, synthetic construct
  REGION 1..890: note = Variant of RNA polymerase
MHHHHHHMNTINIAKNDFSDIELAAIPFNTLADHYGERLAREQLALEHESYEMGEARFREMFERQLKAGEVADNAAAKPLITTLLPKMIARINDWFEEVKAKRGKRPTAFQFLQEIKPEAVAYITIKTTLACLTRADNTTVQAVASAIGRAIEDEARFGRIRDLEAKHFKKNVEEQLNKKVGHVAKKAFMQVVEHDMLSKGLLGGEAWSSWHKEDSIHVGVRCIEMLIESTGMVSLHRQNAGVVGADSETIELAPEYAEAIATRAGALAGISPMFQPCVVPPKPWTGITGGGYWAAGRKPLQLVRTRSLAALRRYEEVSMPEVIKAVNIAQNTAWRINKKVLDVANTITQWQHCPVADVPAMDRGEMPARPLDIDTNEIALKAWKKEASAFYRKDKARMSRRLSMEFMLSQANKFANYEAIWFPQNMDWRGRVYAVPMFNPQGNDMTKGLLTFAQEKPIGEDGFYWLKIHGANTAGVDKVPFPQRIKFVEDNHTNIMECAKAPLENTWWAEQDSPFCFLAFCFEYAGVINSGLSYNCSLPLAFDGSCSGLQHFSAMLRDEIGGKAVNLLPSAEYQDIYRIVSDKVNEMLKQDLINGTSTTVETVTDKKTGEITQRTKYGTKVMAQWWLEHGVNRGVTKRPVMTLVYGSKEFGFRDQVLSDTIQPAIDNGKGDMFLNPNQAAGYMAKLIWNAVSGTVVAAVEAMNWLKSAAKLLAAEVKDEKTDTVLRGRCAVHWVTPDGFPVWQEYKKPIQTRLNLMFLGQFRLQPTINTNKDSEIDARKQVSGIAPNFVHSLNGNHLRMTVVWAHEKYGIESFALIHDSFGTIPADAANLFKAVRETFVDTYESCDVLADFYDQIADQLHESQRDKMPALPAKGKLNLRDILKSDFAFA

SEQ ID NO: 1271 - DNA, 2670 bp, synthetic construct
  misc_feature 1..2670: note = Variant of RNA polymerase
  source 1..2670: mol_type = other DNA
atgcaccatcaccatcaccatatgaacacgattaacattgctaagaacgacttctctgacatcgaactggctgctatcccgttcaacactctggctgaccattacggtgagcgtttagctcgtgaacagttggcccttgagcatgagtcttacgagatgggtgaagcacgcttccgcaagatgtttgagcgtcaacttaaagctggtgaggttgcggataacgctgccgccaagcctctcatcactaccctactccctaagatgattgcacgcatcaacgactggtttgaggaagtgaaagctaagcgcggcaagcgcccgacagccttccagttcctgcaagaaatcaagccggaagccgtagcgtacatcaccattaagaccactctggcttgcctaacccgcgaagacaatacaaccgttcaggctgtagcaagcgcaatcggtcgggccattgaggacgaggctcgcttcggtcgtatccgtgaccttgaagctaagcacttcaagaagaacgttgaggaacaactcaacaagaaggtagggcacgtctacaagaaagcatttatgcaagttgtcgagcacgacatgctctctaagggtctactcggtggcgaggcgtggtcttcgtggcataaggaagactctattcatgtaggagtacgctgcatcgagatgctcattgagtcaaccggaatggttagcttacaccgccaaaatgctggcgtagtgggtgcagactctgagactatcgaactcgcacctgaatacgctgaggctatcgcaacccgtgcaggtgcgctggctggcatctctccgatgttccaaccttgcgtagttcctcctaagccgtggactggcattactggtggtggctattgggctgcggggcgcaaacccctgcagttagtacgtactcgcagtctggcggcgcttcgccgctatgaagaagtgtcgatgccggaggtcatcaaagcagtcaacattgcgcagaatacagcatggcgtattaacaagaaagttctcgacgtagcgaataccatcacccaatggcagcactgtccagtcgcggatgtgcctgcgatggatcgtggcgaaatgccagctcgtccgttggacatcgataccaacgagattgcacttaaagcgtggaagaaagaagcttccgcgttctaccgcaaagacaaagcacgcatgagccgtcgtctgtcgatggagtttatgttatctcaggcgaacaagtttggcaattatgaggctatctggtttccgcaaaacatggattggcgtgggcgcgtgtacgctgtcccgatgttcaatcctcagggcaacgatatgacgaaaggcctgctgacctttgcgcaggagaaacccattggtgaagacggcttctattggctcaagattcatggcgcaaatacagctggagtggataaagtaccgtttccacaacgcatcaaatttgttgaggataaccatacgaacattatggaatgtgcgaaagcaccgctggaaaacacttggtgggcggaacaggactcgccgttctgctttctggcgttctgctttgagtatgctggcgtcatcaatagtggtctgtcgtacaactgtagcttgcctctggcatttgatggtagttgctccggcctgcaacatttctcagcgatgttacgcgacgaaattggcggcaaagctgtgaatctcctcccatctgcggaataccaggatatttatcgtatcgtcagcgacaaagttaacgagatgctgaaacaagatctgattaacggtacctctaccaccgtggaaacggtgactgataaaaagacaggcgaaattacccaacgcacgaaatacgggaccaaagttatggcacagtggtggttagaacacggtgtgaatcgtggcgtcacgaaacgcccggttatgactttggtgtatgggagcaaagagtttggattccgcgatcaagtgctgagtgacaccattcaaccggcgatcgataacggcaagggtgacatgtttctgaatccgaatcaggctgctggttacatggcgaaactgatctggaacgcagtgtccgggaccgtagtcgcagcagttgaggcgatgaactggctgaaaagtgcggcgaaattacttgctgctgaagtgaaggatgagaagacggatacagttctgcgtggccgctgcgcagtacattgggtgactcccgacggcttccctgtgtggcaggaatacaagaagcctattcaaacgcgcttgaacctgatgttcctcggtcagttccgcttacagcctaccattaacaccaacaaagatagcgagattgatgcacgcaaacaggtgtctggtatcgctcctaactttgtacacagcctggacggtaaccaccttcgtatgactgtagtgtgggcacacgagaagtacggaatcgaatcttttgcactgattcacgactccttcggtaccattccggctgacgctgcgaacctgtttaaagcagtgcgcgaaactttcgttgacacatatgagtcttgtgatgtactggctgatttctacgaccagattgttgaccagttgcacgagtctcaacgcgacaaaatgccagcacttccggctaaaggtaagttgaacctccgtgacatcttaaaatcggacttcgcgttcgcg

SEQ ID NO: 1272 - protein, 890 aa, synthetic construct
  REGION 1..890: note = Variant of RNA polymerase
MHHHHHHMNTINIAKNDFSDIELAAIPFNTLADHYGERLAREQLALEHESYEMGEARFRKMFERQLKAGEVADNAAAKPLITTLLPKMIARINDWFEEVKAKRGKRPTAFQFLQEIKPEAVAYITIKTTLACLTREDNTTVQAVASAIGRAIEDEARFGRIRDLEAKHFKKNVEEQLNKKVGHVYKKAFMQVVEHDMLSKGLLGGEAWSSWHKEDSIHVGVRCIEMLIESTGMVSLHRQNAGVVGADSETIELAPEYAEAIATRAGALAGISPMFQPCVVPPKPWTGITGGGYWAAGRKPLQLVRTRSLAALRRYEEVSMPEVIKAVNIAQNTAWRINKKVLDVANTITQWQHCPVADVPAMDRGEMPARPLDIDTNEIALKAWKKEASAFYRKDKARMSRRLSMEFMLSQANKFGNYEAIWFPQNMDWRGRVYAVPMFNPQGNDMTKGLLTFAQEKPIGEDGFYWLKIHGANTAGVDKVPFPQRIKFVEDNHTNIMECAKAPLENTWWAEQDSPFCFLAFCFEYAGVINSGLSYNCSLPLAFDGSCSGLQHFSAMLRDEIGGKAVNLLPSAEYQDIYRIVSDKVNEMLKQDLINGTSTTVETVTDKKTGEITQRTKYGTKVMAQWWLEHGVNRGVTKRPVMTLVYGSKEFGFRDQVLSDTIQPAIDNGKGDMFLNPNQAAGYMAKLIWNAVSGTVVAAVEAMNWLKSAAKLLAAEVKDEKTDTVLRGRCAVHWVTPDGFPVWQEYKKPIQTRLNLMFLGQFRLQPTINTNKDSEIDARKQVSGIAPNFVHSLDGNHLRMTVVWAHEKYGIESFALIHDSFGTIPADAANLFKAVRETFVDTYESCDVLADFYDQIVDQLHESQRDKMPALPAKGKLNLRDILKSDFAFA

SEQ ID NO: 1273 - DNA, 2670 bp, synthetic construct
  misc_feature 1..2670: note = Variant of RNA polymerase
  source 1..2670: mol_type = other DNA
atgcaccatcaccatcaccatatgaacacgattaacattgctaagaacgacttctctgacatcgaactggctgctatcccgttcaacactctggctgaccattacggtgagcgtttagctcgcgaacagttggcccttgagcatgagtcttacgagatgggtgaagcacgcttccgcaagatgtttgagcgtcaacttaaagctggtgaggttgcggataacgctgccgccaagcctctcatcactaccctactccctaagatgattgcacgcatcaacgactggtttgaggaagtgaaagctaagcgcggcaagcgcccgacagccttccagttcctgcaagaaatcaagccggaagccgtagcgtacatcaccattaagaccactctggctctgctaaccagtgcggacaatacaaccgttcaggctgtagcaagcgcaatcggtcgggccattgaggacgaggctcgcttcggtcgtatccgtgaccttgaagctaagcacttcaagaagaacgttgaggaacaactcaacaagcgcgtagggcacgtctacaagaaagcatttatgcaagttgtcgagcacgacatgctctctaagggtctactcggtggcgaggcgtggtcttcgtggcataaggaagactctattcatgtaggagtacgctgcatcgagatgctcattgagtcaaccggaatggttagcttacaccgccaaaatgctggcgtagtaggtcaagactctgagactatcgaactcgcacctgaatacgctgaggctatcgcaacccgtgcaggtgcgctggctggcatctctccgatgttccaaccttgcgtagttcctcctaagccgtggactggcattactggtggtggctattgggctgcggggcgcaaacccctgcagttagtacgtactcgcagtctggcggcgcttcgccgctatgaagaagtgtcgatgccggaggtcatcaaagcagtcaacattgcgcagaatacagcatggcgtattaacaagaaagttctcgacgtagcgaataccatcacccaatggcagcactgtccagtcgcggatgtgcctgcgatggatcgtggcgaaatgccagctcgtccgttggacatcgataccaacgagattgcacttaaagcgtggaagaaagaagcttccgcgttctaccgcaaagacaaagcacgcgttagccgtcgtctgtcaatggagtttatgttatctcaggcgaacaagtttgcgaattatgaggcaatctggtttccgcaaaacatggattggcgtgggcgcgtgtacgctgtcccgatgttcaatcctcagggcaacgatatgacgaaaggcctgctgacctttgcgcaggagaaacccattggtgaagacggcttctattggctcaagattcatggcgcaaatacagctggagtggataaagtaccgtttccacaacgcatcaaatttgttgaggataaccatacgaatattatggaatgcgcgaaagcaccgctggaaaacacttggtgggcggaacaggactcgccgttctgttttctggcgttctgctttgagtatgctggcgtcatcaatagtggtctgtcgtacaactgtagcttgcctctggcatttgatggtagttgctccggcctgcaacatttctcagcgatgttacgcgacgaaattggcggcaaagctgtgaatctcctcccatctgcggaataccaggatatttatcgtatcgtcagcgacaaagttaacgagatgctgaaacaagatctgattaacggtacctctaccaccgtggaaacggtgactgataagaagacaggcgaaattacccaacgcacgaaatacgggaccaaagttatggcacagtggtggttagaacacggtgtgaatcgtggcgtcacgaaacgctcggttatgactttggtgtatgggagcaaagagtttggattccgcgatcaagtgctgagtgacaccattcaaccggcgatcgataacggcaaaggtgacatgtttctgaatccgaatcaggctgctggttacatggcgaaactgatctggaacgcagtgtccgggaccgtagtcgcagcagttgaggcgatgaactggctgaaaagtgcggcgaaattacttgctgctgaagtgaaggatcctaagacggatacagttctgcgtggccgctgcgcagtacattgggtgactcccgacggcttccctgtgtggcaggaatacaagaagcctattcagacgcgcttgaacctgatgttcctcggtcagttccgcttacagcctaccattaacaccaacaaagatagcgagattgatgcacacaaacaggagtctggtatcgctcctaactttgtacacagccaagacggtaaccaccttcgtatgactgtagtgtgggcacacgagaagtacggaatcgaatcttttgcactgattcacgactccttcggtaccattccggctgacgctgcgaacctgttcaaagcagtgcgcgaaactttcgttgacacatatgagtcttgtgatgtactggctgatttctacgaccagttcgctgaccagttgcacgagtctcaacgcgacaaaatgccagcacttccggctaaaggtaacttgaacctccgtgacatcttaaaatcggacttcgcgttcgcg

SEQ ID NO: 1274 - protein, 890 aa, synthetic construct
  REGION 1..890: note = Variant of RNA polymerase
MHHHHHHMNTINIAKNDFSDIELAAIPFNTLADHYGERLAREQLALEHESYEMGEARFRKMFERQLKAGEVADNAAAKPLITTLLPKMIARINDWFEEVKAKRGKRPTAFQFLQEIKPEAVAYITIKTTLALLTSADNTTVQAVASAIGRAIEDEARFGRIRDLEAKHFKKNVEEQLNKRVGHVYKKAFMQVVEHDMLSKGLLGGEAWSSWHKEDSIHVGVRCIEMLIESTGMVSLHRQNAGVVGQDSETIELAPEYAEAIATRAGALAGISPMFQPCVVPPKPWTGITGGGYWAAGRKPLQLVRTRSLAALRRYEEVSMPEVIKAVNIAQNTAWRINKKVLDVANTITQWQHCPVADVPAMDRGEMPARPLDIDTNEIALKAWKKEASAFYRKDKARVSRRLSMEFMLSQANKFANYEAIWFPQNMDWRGRVYAVPMFNPQGNDMTKGLLTFAQEKPIGEDGFYWLKIHGANTAGVDKVPFPQRIKFVEDNHTNIMECAKAPLENTWWAEQDSPFCFLAFCFEYAGVINSGLSYNCSLPLAFDGSCSGLQHFSAMLRDEIGGKAVNLLPSAEYQDIYRIVSDKVNEMLKQDLINGTSTTVETVTDKKTGEITQRTKYGTKVMAQWWLEHGVNRGVTKRSVMTLVYGSKEFGFRDQVLSDTIQPAIDNGKGDMFLNPNQAAGYMAKLIWNAVSGTVVAAVEAMNWLKSAAKLLAAEVKDPKTDTVLRGRCAVHWVTPDGFPVWQEYKKPIQTRLNLMFLGQFRLQPTINTNKDSEIDAHKQESGIAPNFVHSQDGNHLRMTVVWAHEKYGIESFALIHDSFGTIPADAANLFKAVRETFVDTYESCDVLADFYDQFADQLHESQRDKMPALPAKGNLNLRDILKSDFAFA

SEQ ID NO: 1275 - DNA, 2670 bp, synthetic construct
  misc_feature 1..2670: note = Variant of RNA polymerase
  source 1..2670: mol_type = other DNA
atgcaccatcaccatcaccatatgaacacgattaacattgctaagaacgacttctctgacatcgaactggctgctatcccgttcaacactctggctgaccattacggtgagcgtttagctcgcgaacagttggcccttgagcatgagtcttacgagatgggtgaagcacgcttccgcaagatgtttgagcgtcaacttaaagctggtgaggttgcggataacgctgccgccaagcctctcatcactaccctactccctaagatgattgcacgcatcaacgactggtttgaggaagtgaaagctaagcgcggcaagcgcccgacagccttccagttcctgcaagaaatcaagccggaagccgtagcgtacatcaccattaagaccactctggcttgcctgcatagtgcggacaatacaaccgttcaggctgtagcaagcgcaatcggtcgggccattgaggacgaggctcgcttcggtcgtatccgtgaccttgaagctaagcacttcaagaagaacgttgaggaacaactcaacaagcgcgtagggcacgtctacaagaaagcatttatgcaagttgtcgagcacgacatgctctctaagggtctactcggtggcgaggcgtggtcttcgtggcataaggaagactctattcatgtaggagtacgctgcatcgagatgctcattgagtcaaccggaatggttagcttacaccgccaaaatgctggcgtagtgggtgcagactctgagactatcgaactcgcacctgaatacgctgaggctatcgcaacccgtgcaggtgcgctggctggcatctctccgatgttccaaccttgcgtagttcctcctaagccgtggactggcattactggtggtggctattgggctgcggggcgcaaacccctgcagttagtacgtactcgcagtctggcggcgcttcgccgctatgaagaagtgtcgatgccggaggtcatcaaagcagtcaacattgcgcagaatacagcatggcgtattaacaagaaagttctcgacgtagcgaataccatcacccaatggcagcactgtccagtcgcggatgtgcctgcgatggatcgtggcgaaatgccagctcgtccgttggacatcgataccaacgagattgcacttaaagcgtggaagaaagaagcttccgcgttctaccgcaaagacaaagcacgcgttagccgtcgtctgtcaatggagtttatgttatctcaggcgaacaagtttgcgaattatgaggcaatctggtttccgcaaaacatggattggcgtgggcgcgtgtacgctgtcccgatgttcaatcctcagggcaacgatatgacgaaaggcctgctgacctttgcgcaggagaaacccattggtgaagacggcttctattggctcaagattcatggcgcaaatacagctggagtggataaagtaccgtttccacaacgcatcaaatttgttgaggataaccatacgaatattatggaatgcgcgaaagcaccgctggaaaacacttggtgggcggaacaggactcgccgttctgttttctggcgttctgctttgagtatgctggcgtcatcaatagtggtctgtcgtacaactgtagcttgcctctggcatttgatggtagttgctccggcctgcaacatttctcagcgatgttacgcgacgaaattggcggcaaagctgtgaatctcctcccatctgcggaataccaggatatttatcgtatcgtcagcgacaaagttaacgagatgctgaaacaagatctgattaacggtacctctaccaccgtggaaacggtgactgataagaagacaggcgaaattacccaacgcacgaaatacgggaccaaagttatggcacagtggtggttagaacacggtgtgaatcgtggcgtcacgaaacgctcggttatgactttggtgtatgggagcaaagagtttggattccgcgatcaagtgctgagtgacaccattcaaccggcgatcgataacggcaaaggtgacatgtttctgaatccgaatcaggctgctggttacatggcgaaactgatctggaacgcagtgtccgggaccgtagtcgcagcagttgaggcgatgaactggctgaaaagtgcggcgaaattacttgctgctgaagtgaaggatcctaagacggatacagttctgcgtggccgctgcgcagtacattgggtgactcccgacggcttccctgtgtggcaggaatacaagaagcctattcagacgcgcttgaacctgatgttcctcggtcagttccgcttacagcctaccattaacaccaacaaagatagcgagattgatgcacacaaacaggagtctggtatcgctcctaactttgtacacagccaagacggtaaccaccttcgtatgactgtagtgtgggcacacgagaagtacggaatcgaatcttttgcactgattcacgactccttcggtaccattccggctgacgctgcgaacctgttcaaagcagtgcgcgaaactttcgttgacacatatgagtcttgtgatgtactggctgatttctacgaccagttcgctgaccagttgcacgagtctcaacgcgacaaaatgccagcacttccggctaaaggtaacttgaacctccgtgacatcttaaaatcggacttcgcgttcgcg

SEQ ID NO: 1276 - protein, 890 aa, synthetic construct
  REGION 1..890: note = Variant of RNA polymerase
MHHHHHHMNTINIAKNDFSDIELAAIPFNTLADHYGERLAREQLALEHESYEMGEARFRKMFERQLKAGEVADNAAAKPLITTLLPKMIARINDWFEEVKAKRGKRPTAFQFLQEIKPEAVAYITIKTTLACLHSADNTTVQAVASAIGRAIEDEARFGRIRDLEAKHFKKNVEEQLNKRVGHVYKKAFMQVVEHDMLSKGLLGGEAWSSWHKEDSIHVGVRCIEMLIESTGMVSLHRQNAGVVGADSETIELAPEYAEAIATRAGALAGISPMFQPCVVPPKPWTGITGGGYWAAGRKPLQLVRTRSLAALRRYEEVSMPEVIKAVNIAQNTAWRINKKVLDVANTITQWQHCPVADVPAMDRGEMPARPLDIDTNEIALKAWKKEASAFYRKDKARVSRRLSMEFMLSQANKFANYEAIWFPQNMDWRGRVYAVPMFNPQGNDMTKGLLTFAQEKPIGEDGFYWLKIHGANTAGVDKVPFPQRIKFVEDNHTNIMECAKAPLENTWWAEQDSPFCFLAFCFEYAGVINSGLSYNCSLPLAFDGSCSGLQHFSAMLRDEIGGKAVNLLPSAEYQDIYRIVSDKVNEMLKQDLINGTSTTVETVTDKKTGEITQRTKYGTKVMAQWWLEHGVNRGVTKRSVMTLVYGSKEFGFRDQVLSDTIQPAIDNGKGDMFLNPNQAAGYMAKLIWNAVSGTVVAAVEAMNWLKSAAKLLAAEVKDPKTDTVLRGRCAVHWVTPDGFPVWQEYKKPIQTRLNLMFLGQFRLQPTINTNKDSEIDAHKQESGIAPNFVHSQDGNHLRMTVVWAHEKYGIESFALIHDSFGTIPADAANLFKAVRETFVDTYESCDVLADFYDQFADQLHESQRDKMPALPAKGNLNLRDILKSDFAFA

SEQ ID NO: 1277 - DNA, 2670 bp, synthetic construct
  misc_feature 1..2670: note = Variant of RNA polymerase
  source 1..2670: mol_type = other DNA
atgcaccatcaccatcaccatatgaacacgattaacattgctaagaacgacttctctgacatcgaactggctgctatcccgttcaacactctggctgaccattacggtgagcgtttagctcgcgaacagttggcccttgagcatgagtcttacgagatgggtgaagcacgcttccgcaagatgtttgagcgtcaacttaaagctggtgaggttgcggataacgctgccgccaagcctctcatcactaccctactccctaagatgattgcacgcatcaacgactggtttgaggaagtgaaagctaagcgcggcaagcgcccgacagccttccagttcctgcaagaaatcaagccggaagccgtagcgtacatcaccattaagaccactctggctattctaaccagtgcggacaatacaaccgttcaggctgtagcaagcgcaatcggtcgggccattgaggacgaggctcgcttcggtcgtatccgtgaccttgaagctaagcacttcaagaagaacgttgaggaacaactcaacaagcgcgtagggcacgtctacaagaaagcatttatgcaagttgtcgagcacgacatgctctctaagggtctactcggtggcgaggcgtggtcttcgtggcataaggaagactctattcatgtaggagtacgctgcatcgagatgctcattgagtcaaccggaatggttagcttacaccgccaaaatgctggcgtagtaggtcaagactctgagactatcgaactcgcacctgaatacgctgaggctatcgcaacccgtgcaggtgcgctggctggcatctctccgatgttccaaccttgcgtagttcctcctaagccgtggactggcattactggtggtggctattgggctgcggggcgcaaacccctgcagttagtacgtactcgcagtctggcggcgcttcgccgctatgaagaagtgtcgatgccggaggtcatcaaagcagtcaacattgcgcagaatacagcatggcgtattaacaagaaagttctcgacgtagcgaataccatcacccaatggcagcactgtccagtcgcggatgtgcctgcgatggatcgtggcgaaatgccagctcgtccgttggacatcgataccaacgagattgcacttaaagcgtggaagaaagaagcttccgcgttctaccgcaaagacaaagcacgcgttagccgtcgtctgtcaatggagtttatgttatctcaggcgaacaagtttgcgaattatgaggcaatctggtttccgcaaaacatggattggcgtgggcgcgtgtacgctgtcccgatgttcaatcctcagggcaacgatatgacgaaaggcctgctgacctttgcgcaggagaaacccattggtgaagacggcttctattggctcaagattcatggcgcaaatacagctggagtggataaagtaccgtttccacaacgcatcaaatttgttgaggataaccatacgaatattatggaatgcgcgaaagcaccgctggaaaacacttggtgggcggaacaggactcgccgttctgttttctggcgttctgctttgagtatgctggcgtcatcaatagtggtctgtcgtacaactgtagcttgcctctggcatttgatggtagttgctccggcctgcaacatttctcagcgatgttacgcgacgaaattggcggcaaagctgtgaatctcctcccatctgcggaataccaggatatttatcgtatcgtcagcgacaaagttaacgagatgctgaaacaagatctgattaacggtacctctaccaccgtggaaacggtgactgataagaagacaggcgaaattacccaacgcacgaaatacgggaccaaagttatggcacagtggtggttagaacacggtgtgaatcgtggcgtcacgaaacgctcggttatgactttggtgtatgggagcaaagagtttggattccgcgatcaagtgctgagtgacaccattcaaccggcgatcgataacggcaaaggtgacatgtttctgaatccgaatcaggctgctggttacatggcgaaactgatctggaacgcagtgtccgggaccgtagtcgcagcagttgaggcgatgaactggctgaaaagtgcggcgaaattacttgctgctgaagtgaaggatcctaagacggatacagttctgcgtggccgctgcgcagtacattgggtgactcccgacggcttccctgtgtggcaggaatacaagaagcctattcagacgcgcttgaacctgatgttcctcggtcagttccgcttacagcctaccattaacaccaacaaagatagcgagattgatgcacacaaacaggagtctggtatcgctcctaactttgtacacagccaagacggtaaccaccttcgtatgactgtagtgtgggcacacgagaagtacggaatcgaatcttttgcactgattcacgactccttcggtaccattccggctgacgctgcgaacctgttcaaagcagtgcgcgaaactttcgttgacacatatgagtcttgtgatgtactggctgatttctacgaccagttcgctgaccagttgcacgagtctcaacgcgacaaaatgccagcacttccggctaaaggtaacttgaacctccgtgacatcttaaaatcggacttcgcgttcgcg

SEQ ID NO: 1278 - protein, 890 aa, synthetic construct
  REGION 1..890: note = Variant of RNA polymerase
MHHHHHHMNTINIAKNDFSDIELAAIPFNTLADHYGERLAREQLALEHESYEMGEARFRKMFERQLKAGEVADNAAAKPLITTLLPKMIARINDWFEEVKAKRGKRPTAFQFLQEIKPEAVAYITIKTTLAILTSADNTTVQAVASAIGRAIEDEARFGRIRDLEAKHFKKNVEEQLNKRVGHVYKKAFMQVVEHDMLSKGLLGGEAWSSWHKEDSIHVGVRCIEMLIESTGMVSLHRQNAGVVGQDSETIELAPEYAEAIATRAGALAGISPMFQPCVVPPKPWTGITGGGYWAAGRKPLQLVRTRSLAALRRYEEVSMPEVIKAVNIAQNTAWRINKKVLDVANTITQWQHCPVADVPAMDRGEMPARPLDIDTNEIALKAWKKEASAFYRKDKARVSRRLSMEFMLSQANKFANYEAIWFPQNMDWRGRVYAVPMFNPQGNDMTKGLLTFAQEKPIGEDGFYWLKIHGANTAGVDKVPFPQRIKFVEDNHTNIMECAKAPLENTWWAEQDSPFCFLAFCFEYAGVINSGLSYNCSLPLAFDGSCSGLQHFSAMLRDEIGGKAVNLLPSAEYQDIYRIVSDKVNEMLKQDLINGTSTTVETVTDKKTGEITQRTKYGTKVMAQWWLEHGVNRGVTKRSVMTLVYGSKEFGFRDQVLSDTIQPAIDNGKGDMFLNPNQAAGYMAKLIWNAVSGTVVAAVEAMNWLKSAAKLLAAEVKDPKTDTVLRGRCAVHWVTPDGFPVWQEYKKPIQTRLNLMFLGQFRLQPTINTNKDSEIDAHKQESGIAPNFVHSQDGNHLRMTVVWAHEKYGIESFALIHDSFGTIPADAANLFKAVRETFVDTYESCDVLADFYDQFADQLHESQRDKMPALPAKGNLNLRDILKSDFAFA

SEQ ID NO: 1279 - DNA, 2670 bp, synthetic construct
  misc_feature 1..2670: note = Variant of RNA polymerase
  source 1..2670: mol_type = other DNA
atgcaccatcaccatcaccatatgaacacgattaacattgctaagaacgacttctctgacatcgaactggctgctatcccgttcaacactctggctgaccattacggtgagcgtttagctcgcgaacagttggcccttgagcatgagtcttacgagatgggtgaagcacgcttccgcaagatgtttgagcgtcaacttaaagctggtgaggttgcggataacgctgccgccaagcctctcatcactaccctactccctaagatgattgcacgcatcaacgactggtttgaggaagtgaaagctaagcgcggcaagcgcccgacagccttccagttcctgcaagaaatcaagccggaagccgtagcgtacatcaccattaagaccactctggcttgcctgcatagtgcggacaatacaaccgttcaggctgtagcaagcgcaatcggtcgggccattgaggacgaggctcgcttcggtcgtatccgtgaccttgaagctaagcacttcaagaagaacgttgaggaacaactcaacaagcgcgtagggcacgtctacaagaaagcatttatgcaagttgtcgagcacgacatgctctctaagggtctactcggtggcgaggcgtggtcttcgtggcataaggaagactctattcatgtaggagtacgctgcatcgagatgctcattgagtcaaccggaatggttagcttacaccgccaaaatgctggcgtagtgggtcaggactctgagactatcgaactcgcacctgaatacgctgaggctatcgcaacccgtgcaggtgcgctggctggcatctctccgatgttccaaccttgcgtagttcctcctaagccgtggactggcattactggtggtggctattgggctgcggggcgcaaacccctgcagttagtacgtactcgcagtctggcggcgcttcgccgctatgaagaagtgtcgatgccggaggtcatcaaagcagtcaacattgcgcagaatacagcatggcgtattaacaagaaagttctcgacgtagcgaataccatcacccaatggcagcactgtccagtcgcggatgtgcctgcgatggatcgtggcgaaatgccagctcgtccgttggacatcgataccaacgagattgcacttaaagcgtggaagaaagaagcttccgcgttctaccgcaaagacaaagcacgcatgagccgtcgtctgtcgatggagtttatgttatctcaggcgaacaagtttgcgaattatgaggcaatctggtttccgcaaaacatggattggcgtgggcgcgtgtacgctgtcccgatgttcaatcctcagggcaacgatatgacgaaaggcctgctgacctttgcgcaggagaaacccattggtgaagacggcttctattggctcaagattcatggcgcaaatacagctggagtggataaagtaccgtttccacaacgcatcaaatttgttgaggataaccatacgaatattatggaatgcgcgaaagcaccgctggaaaacacttggtgggcggaacaggactcgccgttctgttttctggcgttctgctttgagtatgctggcgtcatcaatagtggtctgtcgtacaactgtagcttgcctctggcatttgatggtagttgctccggcctgcaacatttctcagcgatgttacgcgacgaaattggcggcaaagctgtgaatctcctcccatctgcggaataccaggatatttatcgtatcgtcagcgacaaagttaacgagatgctgaaacaagatctgattaacggtacctctaccaccgtggaaacggtgactgataagaagacaggcgaaattacccaacgcacgaaatacgggaccaaagttatggcacagtggtggttagaacacggtgtgaatcgtggcgtcacgaaacgctcggttatgactttggtgtatgggagcaaagagtttggattccgcgatcaagtgctgagtgacaccattcaaccggcgatcgataacggcaaaggtgacatgtttctgaatccgaatcaggctgctggttacatggcgaaactgatctggaacgcagtgtccgggaccgtagtcgcagcagttgaggcgatgaactggctgaaaagtgcggcgaaattacttgctgctgaagtgaaggatcctaagacggatacagttctgcgtggccgctgcgcagtacattgggtgactcccgacggcttccctgtgtggcaggaatacaagaagcctattcagacgcgcttgaacctgatgttcctcggtcagttccgcttacagcctaccattaacaccaacaaagatagcgagattgatgcacacaaacaggagtctggtatcgctcctaactttgtacacagccaagacggtaaccaccttcgtatgactgtagtgtgggcacacgagaagtacggaatcgaatcttttgcactgattcacgactccttcggtaccattccggctgacgctgcgaacctgttcaaagcagtgcgcgaaactttcgttgacacatatgagtcttgtgatgtactggctgatttctacgaccagttcgctgaccagttgcacgagtctcaacgcgacaaaatgccagcacttccggctaaaggtaacttgaacctccgtgacatcttaaaatcggacttcgcgttcgcg

SEQ ID NO: 1280 - protein, 890 aa, synthetic construct
  REGION 1..890: note = Variant of RNA polymerase
MHHHHHHMNTINIAKNDFSDIELAAIPFNTLADHYGERLAREQLALEHESYEMGEARFRKMFERQLKAGEVADNAAAKPLITTLLPKMIARINDWFEEVKAKRGKRPTAFQFLQEIKPEAVAYITIKTTLACLHSADNTTVQAVASAIGRAIEDEARFGRIRDLEAKHFKKNVEEQLNKRVGHVYKKAFMQVVEHDMLSKGLLGGEAWSSWHKEDSIHVGVRCIEMLIESTGMVSLHRQNAGVVGQDSETIELAPEYAEAIATRAGALAGISPMFQPCVVPPKPWTGITGGGYWAAGRKPLQLVRTRSLAALRRYEEVSMPEVIKAVNIAQNTAWRINKKVLDVANTITQWQHCPVADVPAMDRGEMPARPLDIDTNEIALKAWKKEASAFYRKDKARMSRRLSMEFMLSQANKFANYEAIWFPQNMDWRGRVYAVPMFNPQGNDMTKGLLTFAQEKPIGEDGFYWLKIHGANTAGVDKVPFPQRIKFVEDNHTNIMECAKAPLENTWWAEQDSPFCFLAFCFEYAGVINSGLSYNCSLPLAFDGSCSGLQHFSAMLRDEIGGKAVNLLPSAEYQDIYRIVSDKVNEMLKQDLINGTSTTVETVTDKKTGEITQRTKYGTKVMAQWWLEHGVNRGVTKRSVMTLVYGSKEFGFRDQVLSDTIQPAIDNGKGDMFLNPNQAAGYMAKLIWNAVSGTVVAAVEAMNWLKSAAKLLAAEVKDPKTDTVLRGRCAVHWVTPDGFPVWQEYKKPIQTRLNLMFLGQFRLQPTINTNKDSEIDAHKQESGIAPNFVHSQDGNHLRMTVVWAHEKYGIESFALIHDSFGTIPADAANLFKAVRETFVDTYESCDVLADFYDQFADQLHESQRDKMPALPAKGNLNLRDILKSDFAFA

SEQ ID NO: 1281 - DNA, 2670 bp, synthetic construct
  misc_feature 1..2670: note = Variant of RNA polymerase
  source 1..2670: mol_type = other DNA
atgcaccatcaccatcaccatatgaacacgattaacattgctaagaacgacttctctgacatcgaactggctgctatcccgttcaacactctggctgaccattacggtgagcgtttagctcgcgaacagttggcccttgagcatgagtcttacgagatgggtgaagcacgcttccgcaagatgtttgagcgtcaacttaaagctggtgaggttgcggataacgctgccgccaagcctctcatcactaccctactccctaagatgattgcacgcatcaacgactggtttgaggaagtgaaagctaagcgcggcaagcgcccgacagccttccagttcctgcaagaaatcaagccggaagccgtagcgtacatcaccattaagaccactctggcttgcctaaccagtgcggacaatacaaccgttcaggctgtagcaagcgcaatcggtcgggccattgaggacgaggctcgcttcggtcgtatccgtgaccttgaagctaagcacttcaagaagaacgttgaggaacaactcaacaagcgcgtagggcacgtctacaagaaagcatttatgcaagttgtcgagcacgacatgctctctaagggtctactcggtggcgaggcgtggtcttcgtggcataaggaagactctattcatgtaggagtacgctgcatcgagatgctcattgagtcaaccggaatggttagcttacaccgccaaaatgctggcgtagtaggtcaagactctgagactatcgaactcgcacctgaatacgctgaggctatcgcaacccgtgcaggtgcgctggctggcatctctccgatgttccaaccttgcgtagttcctcctaagccgtggactggcattactggtggtggctattgggctgcggggcgcaaacccctgcagttagtacgtactcgcagtctggcggcgcttcgccgctatgaagaagtgtcgatgccggaggtcatcaaagcagtcaacattgcgcagaatacagcatggcgtattaacaagaaagttctcgacgtagcgaataccatcacccaatggcagcactgtccagtcgcggatgtgcctgcgatggatcgtggcgaaatgccagctcgtccgttggacatcgataccaacgagattgcacttaaagcgtggaagaaagaagcttccgcgttctaccgcaaagacaaagcacgcgttagccgtcgtctgtcaatggagtttatgttatctcaggcgaacaagtttgcgaattatgaggcaatctggtttccgcaaaacatggattggcgtgggcgcgtgtacgctgtcccgatgttcaatcctcagggcaacgatatgacgaaaggcctgctgacctttgcgcaggagaaacccattggtgaagacggcttctattggctcaagattcatggcgcaaatacagctggagtggataaagtaccgtttccacaacgcatcaaatttgttgaggataaccatacgaatattatggaatgcgcgaaagcaccgctggaaaacacttggtgggcggaacaggactcgccgttctgttttctggcgttctgctttgagtatgctggcgtcatcaatagtggtctgtcgtacaactgtagcttgcctctggcatttgatggtagttgctccggcctgcaacatttctcagcgatgttacgcgacgaaattggcggcaaagctgtgaatctcctcccatctgcggaataccaggatatttatcgtatcgtcagcgacaaagttaacgagatgctgaaacaagatctgattaacggtacctctaccaccgtggaaacggtgactgataagaagacaggcgaaattacccaacgcacgaaatacgggaccaaagttatggcacagtggtggttagaacacggtgtgaatcgtggcgtcacgaaacgctcggttatgactttggtgtatgggagcaaagagtttggattccgccaacaagtgctgagtgacaccattcaaccggcgatcgataacggcaaaggtgacatgtttctgaatccgaatcaggctgctggttacatggcgaaactgatctggaacgcagtgtccgggaccgtagtcgcagcagttgaggcgatgaactggctgaaaagtgcggcgaaattacttgctgctgaagtgaaggatcctaagacggatacagttctgcgtggccgctgcgcagtacattgggtgactcccgacggcttccctgtgtggcaggaatacaagaagcctattcagacgcgcttgaacctgatgttcctcggtcagttccgcttacagcctaccattaacaccaacaaagatagcgagattgatgcacacaaacaggagtctggtatcgctcctaactttgtacacagccaagacggtaaccaccttcgtatgactgtagtgtgggcacacgagaagtacggaatcgaatcttttgcactgattcacgactccttcggtaccattccggctgacgctgcgaacctgttcaaagcagtgcgcgaaactttcgttgacacatatgagtcttgtgatgtactggctgatttctacgaccagttcgctgaccagttgcacgagtctcaacgcgacaaaatgccagcacttccggctaaaggtaacttgaacctccgtgacatcttaaaatcggacttcgcgttcgcg

SEQ ID NO: 1282 - protein, 890 aa, synthetic construct
  REGION 1..890: note = Variant of RNA polymerase
MHHHHHHMNTINIAKNDFSDIELAAIPFNTLADHYGERLAREQLALEHESYEMGEARFRKMFERQLKAGEVADNAAAKPLITTLLPKMIARINDWFEEVKAKRGKRPTAFQFLQEIKPEAVAYITIKTTLACLTSADNTTVQAVASAIGRAIEDEARFGRIRDLEAKHFKKNVEEQLNKRVGHVYKKAFMQVVEHDMLSKGLLGGEAWSSWHKEDSIHVGVRCIEMLIESTGMVSLHRQNAGVVGQDSETIELAPEYAEAIATRAGALAGISPMFQPCVVPPKPWTGITGGGYWAAGRKPLQLVRTRSLAALRRYEEVSMPEVIKAVNIAQNTAWRINKKVLDVANTITQWQHCPVADVPAMDRGEMPARPLDIDTNEIALKAWKKEASAFYRKDKARVSRRLSMEFMLSQANKFANYEAIWFPQNMDWRGRVYAVPMFNPQGNDMTKGLLTFAQEKPIGEDGFYWLKIHGANTAGVDKVPFPQRIKFVEDNHTNIMECAKAPLENTWWAEQDSPFCFLAFCFEYAGVINSGLSYNCSLPLAFDGSCSGLQHFSAMLRDEIGGKAVNLLPSAEYQDIYRIVSDKVNEMLKQDLINGTSTTVETVTDKKTGEITQRTKYGTKVMAQWWLEHGVNRGVTKRSVMTLVYGSKEFGFRQQVLSDTIQPAIDNGKGDMFLNPNQAAGYMAKLIWNAVSGTVVAAVEAMNWLKSAAKLLAAEVKDPKTDTVLRGRCAVHWVTPDGFPVWQEYKKPIQTRLNLMFLGQFRLQPTINTNKDSEIDAHKQESGIAPNFVHSQDGNHLRMTVVWAHEKYGIESFALIHDSFGTIPADAANLFKAVRETFVDTYESCDVLADFYDQFADQLHESQRDKMPALPAKGNLNLRDILKSDFAFA

SEQ ID NO: 1283 - DNA, 2670 bp, synthetic construct
  misc_feature 1..2670: note = Variant of RNA polymerase
  source 1..2670: mol_type = other DNA
atgcaccatcaccatcaccatatgaacacgattaacattgctaagaacgacttctctgacatcgaactggctgctatcccgttcaacactctggctgaccattacggtgagcgtttagctcgcgaacagttggcccttgagcatgagtcttacgagatgggtgaagcacgcttccgcaagatgtttgagcgtcaacttaaagctggtgaggttgcggataacgctgccgccaagcctctcatcactaccctactccctaagatgattgcacgcatcaacgactggtttgaggaagtgaaagctaagcgcggcaagcgcccgacagccttccagttcctgcaagaaatcaagccggaagccgtagcgtacatcaccattaagaccactctggcttgcctaaccagtgcggacaatacaaccgttcaggctgtagcaagcgcaatcggtcgggccattgaggacgaggctcgcttcggtcgtatccgtgaccttgaagctaagcacttcaagaagaacgttgaggaacaactcaacaagcgcgtagggcacgtctacaagaaagcatttatgcaagttgtcgagcacgacatgctctctaagggtctactcggtggcgaggcgtggtcttcgtggcataaggaagactctattcatgtaggagtacgctgcatcgagatgctcattgagtcaaccggaatggttagcttacaccgccaaaatgctggcgtagtaggtcaagactctgagactatcgaactcgcacctgaatacgctgaggctatcgcaacccgtgcaggtgcgctggctggcatctctccgatgttccaaccttgcgtagttcctcctaagccgtggactggcattactggtggtggctattgggctgcggggcgcaaacccctgcagttagtacgtactcgcagtctggcggcgcttcgccgctatgaagaagtgtcgatgccggaggtcatcaaagcagtcaacattgcgcagaatacagcatggcgtattaacaagaaagttctcgacgtagcgaataccatcacccaatggcagcactgtccagtcgcggatgtgcctgcgatggatcgtggcgaaatgccagctcgtccgttggacatcgataccaacgagattgcacttaaagcgtggaagaaagcagcttccgcgttctaccgcaaagacaaagcacgcgttagccgtcgtctgtcaatggagtttatgttatctcaggcgaacaagtttgcgaattatgaggcaatctggtttccgcaaaacatggattggcgtgggcgcgtgtacgctgtcccgatgttcaatcctcagggcaacgatatgacgaaaggcctgctgacctttgcgcaggagaaacccattggtgaagacggcttctattggctcaagattcatggcgcaaatacagctggagtggataaagtaccgtttccacaacgcatcaaatttgttgaggataaccatacgaatattatggaatgcgcgaaagcaccgctggaaaacacttggtgggcggaacaggactcgccgttctgttttctggcgttctgctttgagtatgctggcgtcatcaatagtggtctgtcgtacaactgtagcttgcctctggcatttgatggtagttgctccggcctgcaacatttctcagcgatgttacgcgacgaaattggcggcaaagctgtgaatctcctcccatctgcggaataccaggatatttatcgtatcgtcagcgacaaagttaacgagatgctgaaacaagatctgattaacggtacctctaccaccgtggaaacggtgactgataagaagacaggcgaaattacccaacgcacgaaatacgggaccaaagttatggcacagtggtggttagaacacggtgtgaatcgtggcgtcacgaaacgctcggttatgactttggtgtatgggagcaaagagtttggattccgcgatcaagtgctgagtgacaccattcaaccggcgatcgataacggcaaaggtgacatgtttctgaatccgaatcaggctgctggttacatggcgaaactgatctggaacgcagtgtccgggaccgtagtcgcagcagttgaggcgatgaactggctgaaaagtgcggcgaaattacttgctgctgaagtgaaggatcctaagacggatacagttctgcgtggccgctgcgcagtacattgggtgactcccgacggcttccctgtgtggcaggaatacaagaagcctattcagacgcgcttgaacctgatgttcctcggtcagttccgcttacagcctaccattaacaccaacaaagatagcgagattgatgcacacaaacaggagtctggtatcgctcctaactttgtacacagccaagacggtaaccaccttcgtatgactgtagtgtgggcacacgagaagtacggaatcgaatcttttgcactgattcacgactccttcggtaccattccggctgacgctgcgaacctgttcaaagcagtgcgcgaaactttcgttgacacatatgagtcttgtgatgtactggctgatttctacgaccagttcgctgaccagttgcacgagtctcaacgcgacaaaatgccagcacttccggctaaaggtaacttgaacctccgtgacatcttaaaatcggacttcgcgttcgcg

SEQ ID NO: 1284 - protein, 890 aa, synthetic construct
  REGION 1..890: note = Variant of RNA polymerase
MHHHHHHMNTINIAKNDFSDIELAAIPFNTLADHYGERLAREQLALEHESYEMGEARFRKMFERQLKAGEVADNAAAKPLITTLLPKMIARINDWFEEVKAKRGKRPTAFQFLQEIKPEAVAYITIKTTLACLTSADNTTVQAVASAIGRAIEDEARFGRIRDLEAKHFKKNVEEQLNKRVGHVYKKAFMQVVEHDMLSKGLLGGEAWSSWHKEDSIHVGVRCIEMLIESTGMVSLHRQNAGVVGQDSETIELAPEYAEAIATRAGALAGISPMFQPCVVPPKPWTGITGGGYWAAGRKPLQLVRTRSLAALRRYEEVSMPEVIKAVNIAQNTAWRINKKVLDVANTITQWQHCPVADVPAMDRGEMPARPLDIDTNEIALKAWKKAASAFYRKDKARVSRRLSMEFMLSQANKFANYEAIWFPQNMDWRGRVYAVPMFNPQGNDMTKGLLTFAQEKPIGEDGFYWLKIHGANTAGVDKVPFPQRIKFVEDNHTNIMECAKAPLENTWWAEQDSPFCFLAFCFEYAGVINSGLSYNCSLPLAFDGSCSGLQHFSAMLRDEIGGKAVNLLPSAEYQDIYRIVSDKVNEMLKQDLINGTSTTVETVTDKKTGEITQRTKYGTKVMAQWWLEHGVNRGVTKRSVMTLVYGSKEFGFRDQVLSDTIQPAIDNGKGDMFLNPNQAAGYMAKLIWNAVSGTVVAAVEAMNWLKSAAKLLAAEVKDPKTDTVLRGRCAVHWVTPDGFPVWQEYKKPIQTRLNLMFLGQFRLQPTINTNKDSEIDAHKQESGIAPNFVHSQDGNHLRMTVVWAHEKYGIESFALIHDSFGTIPADAANLFKAVRETFVDTYESCDVLADFYDQFADQLHESQRDKMPALPAKGNLNLRDILKSDFAFA

SEQ ID NO: 1285 - DNA, 2670 bp, synthetic construct
  misc_feature 1..2670: note = Variant of RNA polymerase
  source 1..2670: mol_type = other DNA
atgcaccatcaccatcaccatatgaacacgattaacattgctaagaacgacttctctgacatcgaactggctgctatcccgttcaacactctggctgaccattacggtgagcgtttagctcgcgaacagttggcccttgagcatgagtcttacgagatgggtgaagcacgcttccgcaagatgtttgagcgtcaacttaaagctggtgaggttgcggataacgctgccgccaagcctctcatcactaccctactccctaagatgattgcacgcatcaacgactggtttgaggaagtgaaagctaagcgcggcaagcgcccgacagccttccagttcctgcaagaaatcaagccggaagccgtagcgtacatcaccattaagaccactctggcttgcctaaccagtgcggacaatacaaccgttcaggctgtagcaagcgcaatcggtcgggccattgaggacgaggctcgcttcggtcgtatccgtgaccttgaagctaagcacttcaagaagaacgttgaggaacaactcaacaagcgcgtagggcacgtctacaagaaagcatttatgcaagttgtcgagcacgacatgctctctaagggtctactcggtggcgaggcgtggtcttcgtggcataaggaagactctattcatgtaggagtacgctgcatcgagatgctcattgagtcaaccggaatggttagcttacaccgccaaaatgctggcgtagtaggtcaagactctgagactatcgaactcgcacctgaatacgctgaggctatcgcaacccgtgcaggtgcgctggctggcatctctccgatgttccaaccttgcgtagttcctcctaagccgtggactggcattactggtggtggctattgggctgcggggcgcaaacccctgcagttagtacgtactcgcagtctggcggcgcttcgccgctatgaagaagtgtcgatgccggaggtcatcaaagcagtcaacattgcgcagaatacagcatggcgtattaacaagaaagttctcgacgtagcgaataccatcacccaatggcagcactgtccagtcgcggatgtgcctgcgatggatcgtggcgaaatgccagctaaaccgttggacatcgataccaacgagattgcacttaaagcgtggaagaaagaagcttccgcgttctaccgcaaagacaaagcacgcgttagccgtcgtctgtcaatggagtttatgttatctcaggcgaacaagtttgcgaattatgaggcaatctggtttccgcaaaacatggattggcgtgggcgcgtgtacgctgtcccgatgttcaatcctcagggcaacgatatgacgaaaggcctgctgacctttgcgcaggagaaacccattggtgaagacggcttctattggctcaagattcatggcgcaaatacagctggagtggataaagtaccgtttccacaacgcatcaaatttgttgaggataaccatacgaatattatggaatgcgcgaaagcaccgctggaaaacacttggtgggcggaacaggactcgccgttctgttttctggcgttctgctttgagtatgctggcgtcatcaatagtggtctgtcgtacaactgtagcttgcctctggcatttgatggtagttgctccggcctgcaacatttctcagcgatgttacgcgacgaaattggcggcaaagctgtgaatctcctcccatctgcggaataccaggatatttatcgtatcgtcagcgacaaagttaacgagatgctgaaacaagatctgattaacggtacctctaccaccgtggaaacggtgactgataagaagacaggcgaaattacccaacgcacgaaatacgggaccaaagttatggcacagtggtggttagaacacggtgtgaatcgtggcgtcacgaaacgctcggttatgactttggtgtatgggagcaaagagtttggattccgcgatcaagtgctgagtgacaccattcaaccggcgatcgataacggcaaaggtgacatgtttctgaatccgaatcaggctgctggttacatggcgaaactgatctggaacgcagtgtccgggaccgtagtcgcagcagttgaggcgatgaactggctgaaaagtgcggcgaaattacttgctgctgaagtgaaggatcctaagacggatacagttctgcgtggccgctgcgcagtacattgggtgactcccgacggcttccctgtgtggcaggaatacaagaagcctattcagacgcgcttgaacctgatgttcctcggtcagttccgcttacagcctaccattaacaccaacaaagatagcgagattgatgcacacaaacaggagtctggtatcgctcctaactttgtacacagccaagacggtaaccaccttcgtatgactgtagtgtgggcacacgagaagtacggaatcgaatcttttgcactgattcacgactccttcggtaccattccggctgacgctgcgaacctgttcaaagcagtgcgcgaaactttcgttgacacatatgagtcttgtgatgtactggctgatttctacgaccagttcgctgaccagttgcacgagtctcaacgcgacaaaatgccagcacttccggctaaaggtaacttgaacctccgtgacatcttaaaatcggacttcgcgttcgcg

SEQ ID NO: 1286 - protein, 890 aa, synthetic construct
  REGION 1..890: note = Variant of RNA polymerase
MHHHHHHMNTINIAKNDFSDIELAAIPFNTLADHYGERLAREQLALEHESYEMGEARFRKMFERQLKAGEVADNAAAKPLITTLLPKMIARINDWFEEVKAKRGKRPTAFQFLQEIKPEAVAYITIKTTLACLTSADNTTVQAVASAIGRAIEDEARFGRIRDLEAKHFKKNVEEQLNKRVGHVYKKAFMQVVEHDMLSKGLLGGEAWSSWHKEDSIHVGVRCIEMLIESTGMVSLHRQNAGVVGQDSETIELAPEYAEAIATRAGALAGISPMFQPCVVPPKPWTGITGGGYWAAGRKPLQLVRTRSLAALRRYEEVSMPEVIKAVNIAQNTAWRINKKVLDVANTITQWQHCPVADVPAMDRGEMPAKPLDIDTNEIALKAWKKEASAFYRKDKARVSRRLSMEFMLSQANKFANYEAIWFPQNMDWRGRVYAVPMFNPQGNDMTKGLLTFAQEKPIGEDGFYWLKIHGANTAGVDKVPFPQRIKFVEDNHTNIMECAKAPLENTWWAEQDSPFCFLAFCFEYAGVINSGLSYNCSLPLAFDGSCSGLQHFSAMLRDEIGGKAVNLLPSAEYQDIYRIVSDKVNEMLKQDLINGTSTTVETVTDKKTGEITQRTKYGTKVMAQWWLEHGVNRGVTKRSVMTLVYGSKEFGFRDQVLSDTIQPAIDNGKGDMFLNPNQAAGYMAKLIWNAVSGTVVAAVEAMNWLKSAAKLLAAEVKDPKTDTVLRGRCAVHWVTPDGFPVWQEYKKPIQTRLNLMFLGQFRLQPTINTNKDSEIDAHKQESGIAPNFVHSQDGNHLRMTVVWAHEKYGIESFALIHDSFGTIPADAANLFKAVRETFVDTYESCDVLADFYDQFADQLHESQRDKMPALPAKGNLNLRDILKSDFAFA

SEQ ID NO: 1287 - DNA, 2670 bp, synthetic construct
  misc_feature 1..2670: note = Variant of RNA polymerase
  source 1..2670: mol_type = other DNA
atgcaccatcaccatcaccatatgaacacgattaacattgctaagaacgacttctctgacatcgaactggctgctatcccgttcaacactctggctgaccattacggtgagcgtttagctcgcgaacagttggcccttgagcatgagtcttacgagatgggtgaagcacgcttccgcaagatgtttgagcgtcaacttaaagctggtgaggttgcggataacgctgccgccaagcctctcatcactaccctactccctaagatgattgcacgcatcaacgactggtttgaggaagtgaaagctaagcgcggcaagcgcccgacagccttccagttcctgcaagaaatcaagccggaagccgtagcgtacatcaccattaagaccactctggcttgcctaaccagtgcggacaatacaaccgttcaggctgtagcaagcgcaatcggtcgggccattgaggacgaggctcgcttcggtcgtatccgtgaccttgaagctaagcacttcaagaagaacgttgaggaacaactcaacaagcgcgtagggcacgtctacaagaaagcatttatgcaagttgtcgagcacgacatgctctctaagggtctactcggtggcgaggcgtggtcttcgtggcataaggaagactctattcatgtaggagtacgctgcatcgagatgctcattgagtcaaccggaatggttagcttacaccgccaaaatgctggcgtagtaggtcaagactctgagactatcgaactcgcacctgaatacgctgaggctatcgcaacccgtgcaggtgcgctggctggcatctctccgatgttccaaccttgcgtagttcctcctaagccgtggactggcattactggtggtggctattgggctgcggggcgcaaacccctgcagttagtacgtactcgcagtctggcggcgcttcgccgctatgaagaagtgtcgatgccggaggtcatcaaagcagtcaacattgcgcagaatacagcatggcgtattaacaagaaagttctcgacgtagcgaataccatcacccaatggcagcactgtccagtccgtgatgtgcctgcgatggatcgtggcgaaatgccagctcgtccgttggacatcgataccaacgagattgcacttaaagcgtggaagaaagaagcttccgcgttctaccgcaaagacaaagcacgcgttagccgtcgtctgtcaatggagtttatgttatctcaggcgaacaagtttgcgaattatgaggcaatctggtttccgcaaaacatggattggcgtgggcgcgtgtacgctgtcccgatgttcaatcctcagggcaacgatatgacgaaaggcctgctgacctttgcgcaggagaaacccattggtgaagacggcttctattggctcaagattcatggcgcaaatacagctggagtggataaagtaccgtttccacaacgcatcaaatttgttgaggataaccatacgaatattatggaatgcgcgaaagcaccgctggaaaacacttggtgggcggaacaggactcgccgttctgttttctggcgttctgctttgagtatgctggcgtcatcaatagtggtctgtcgtacaactgtagcttgcctctggcatttgatggtagttgctccggcctgcaacatttctcagcgatgttacgcgacgaaattggcggcaaagctgtgaatctcctcccatctgcggaataccaggatatttatcgtatcgtcagcgacaaagttaacgagatgctgaaacaagatctgattaacggtacctctaccaccgtggaaacggtgactgataagaagacaggcgaaattacccaacgcacgaaatacgggaccaaagttatggcacagtggtggttagaacacggtgtgaatcgtggcgtcacgaaacgctcggttatgactttggtgtatgggagcaaagagtttggattccgcgatcaagtgctgagtgacaccattcaaccggcgatcgataacggcaaaggtgacatgtttctgaatccgaatcaggctgctggttacatggcgaaactgatctggaacgcagtgtccgggaccgtagtcgcagcagttgaggcgatgaactggctgaaaagtgcggcgaaattacttgctgctgaagtgaaggatcctaagacggatacagttctgcgtggccgctgcgcagtacattgggtgactcccgacggcttccctgtgtggcaggaatacaagaagcctattcagacgcgcttgaacctgatgttcctcggtcagttccgcttacagcctaccattaacaccaacaaagatagcgagattgatgcacacaaacaggagtctggtatcgctcctaactttgtacacagccaagacggtaaccaccttcgtatgactgtagtgtgggcacacgagaagtacggaatcgaatcttttgcactgattcacgactccttcggtaccattccggctgacgctgcgaacctgttcaaagcagtgcgcgaaactttcgttgacacatatgagtcttgtgatgtactggctgatttctacgaccagttcgctgaccagttgcacgagtctcaacgcgacaaaatgccagcacttccggctaaaggtaacttgaacctccgtgacatcttaaaatcggacttcgcgttcgcg

SEQ ID NO: 1288 - protein, 890 aa, synthetic construct
  REGION 1..890: note = Variant of RNA polymerase
MHHHHHHMNTINIAKNDFSDIELAAIPFNTLADHYGERLAREQLALEHESYEMGEARFRKMFERQLKAGEVADNAAAKPLITTLLPKMIARINDWFEEVKAKRGKRPTAFQFLQEIKPEAVAYITIKTTLACLTSADNTTVQAVASAIGRAIEDEARFGRIRDLEAKHFKKNVEEQLNKRVGHVYKKAFMQVVEHDMLSKGLLGGEAWSSWHKEDSIHVGVRCIEMLIESTGMVSLHRQNAGVVGQDSETIELAPEYAEAIATRAGALAGISPMFQPCVVPPKPWTGITGGGYWAAGRKPLQLVRTRSLAALRRYEEVSMPEVIKAVNIAQNTAWRINKKVLDVANTITQWQHCPVRDVPAMDRGEMPARPLDIDTNEIALKAWKKEASAFYRKDKARVSRRLSMEFMLSQANKFANYEAIWFPQNMDWRGRVYAVPMFNPQGNDMTKGLLTFAQEKPIGEDGFYWLKIHGANTAGVDKVPFPQRIKFVEDNHTNIMECAKAPLENTWWAEQDSPFCFLAFCFEYAGVINSGLSYNCSLPLAFDGSCSGLQHFSAMLRDEIGGKAVNLLPSAEYQDIYRIVSDKVNEMLKQDLINGTSTTVETVTDKKTGEITQRTKYGTKVMAQWWLEHGVNRGVTKRSVMTLVYGSKEFGFRDQVLSDTIQPAIDNGKGDMFLNPNQAAGYMAKLIWNAVSGTVVAAVEAMNWLKSAAKLLAAEVKDPKTDTVLRGRCAVHWVTPDGFPVWQEYKKPIQTRLNLMFLGQFRLQPTINTNKDSEIDAHKQESGIAPNFVHSQDGNHLRMTVVWAHEKYGIESFALIHDSFGTIPADAANLFKAVRETFVDTYESCDVLADFYDQFADQLHESQRDKMPALPAKGNLNLRDILKSDFAFA

SEQ ID NO: 1289 - DNA, 2670 bp, synthetic construct
  misc_feature 1..2670: note = Variant of RNA polymerase
  source 1..2670: mol_type = other DNA
atgcaccatcaccatcaccatatgaacacgattaacattgctaagaacgacttctctgacatcgaactggctgctatcccgttcaacactctggctgaccattacggtgagcgtttagctcgcgaacagttggcccttgagcatgagtcttacgagatgggtgaagcacgcttccgcaagatgtttgagcgtcaacttaaagctggtgaggttgcggataacgctgccgccaagcctctcatcactaccctactccctaagatgattgcacgcatcaacgactggtttgaggaagtgaaagctaagcgcggcaagcgcccgacagccttccagttcctgcaagaaatcaagccggaagccgtagcgtacatcaccattaagaccactctggcttgcctaaccagtgcggacaatacaaccgttcaggctgtagcaagcgcaatcggtcgggccattgaggacgaggctcgcttcggtcgtatccgtgaccttgaagctaagcacttcaagaagaacgttgaggaacaactcaacaagcgcgtagggcacgtctacaagaaagcatttatgcaagttgtcgagcacgacatgctctctaagggtctactcggtggcgaggcgtggtcttcgtggcataaggaagactctattcatgtaggagtacgctgcatcgagatgctcattgagtcaaccggaatggttagcttacaccgccaaaatgctggcgtagtaggtcaagactctgagactatcgaactcgcacctgaatacgctgaggctatcgcaacccgtgcaggtgcgctggctggcatctctccgatgttccaaccttgcgtagttcctcctaagccgtggactggcattactggtggtggctattgggctgcggggcgcaaacccctgcagttagtacgtactcgcagtctggcggcgcttcgccgctatgaagaagtgtcgatgccggaggtcatcaaagcagtcaacattgcgcagaatacagcatggcgtattaacaagaaagttctcgacgtagcgaataccatcacccaatggcagcactgtccagtcgcggatgtgcctgcgatggatcgtggcgaaatgccagctcgtccgttggacatcgataccaacgagattgcacttaaagcgtggaagaaagaagcttccgcgttctaccgcaaagacaaagcacgcgttagccgtcgtctgtcaatggagtttatgttatctcaggcgaacaagtttgcgaattatgaggcaatctggtttccgcaaaacatggattggcgtgggcgcgtgtacgctgtcccgatgttcaatcctcagggcaacgatatgacgaaaggcctgctgacctttgcgcaggagaaacccattggtgaagacggcttctattggctcaagattcatggcgcaaatacagctggagtggataaagtaccgtttccacaacgcatcaaatttgttgaggataaccatacgaatattatggaatgcgcgaaagcaccgctggaaaacacttggtgggcggaacaggactcgccgttctgttttctggcgttctgctttgagtatgctggcgtcatcaatagtggtctgtcgtacaactgtagcttgcctctggcatttgatggtagttgctccggcctgcaacatttctcagcgatgttacgcgacgaaattggcggcaaagctgtgaatctcctcccatctgcggaataccaggatatttatcgtatcgtcagcgacaaagttaacgagatgctgaaacaagatctgattaacggtacctctaccaccgtggaaacggtgactgataagaagacaggcgaaattacccaacgcacgaaatacgggaccaaagttatggcacagtggtggttagaacacggtgtgaatcgtagtgtcacgaaacgctcggttatgactttggtgtatgggagcaaagagtttggattccgcgatcaagtgctgagtgacaccattcaaccggcgatcgataacggcaaaggtgacatgtttctgaatccgaatcaggctgctggttacatggcgaaactgatctggaacgcagtgtccgggaccgtagtcgcagcagttgaggcgatgaactggctgaaaagtgcggcgaaattacttgctgctgaagtgaaggatcctaagacggatacagttctgcgtggccgctgcgcagtacattgggtgactcccgacggcttccctgtgtggcaggaatacaagaagcctattcagacgcgcttgaacctgatgttcctcggtcagttccgcttacagcctaccattaacaccaacaaagatagcgagattgatgcacacaaacaggagtctggtatcgctcctaactttgtacacagccaagacggtaaccaccttcgtatgactgtagtgtgggcacacgagaagtacggaatcgaatcttttgcactgattcacgactccttcggtaccattccggctgacgctgcgaacctgttcaaagcagtgcgcgaaactttcgttgacacatatgagtcttgtgatgtactggctgatttctacgaccagttcgctgaccagttgcacgagtctcaacgcgacaaaatgccagcacttccggctaaaggtaacttgaacctccgtgacatcttaaaatcggacttcgcgttcgcg

SEQ ID NO: 1290 - protein, 890 aa, synthetic construct
  REGION 1..890: note = Variant of RNA polymerase
MHHHHHHMNTINIAKNDFSDIELAAIPFNTLADHYGERLAREQLALEHESYEMGEARFRKMFERQLKAGEVADNAAAKPLITTLLPKMIARINDWFEEVKAKRGKRPTAFQFLQEIKPEAVAYITIKTTLACLTSADNTTVQAVASAIGRAIEDEARFGRIRDLEAKHFKKNVEEQLNKRVGHVYKKAFMQVVEHDMLSKGLLGGEAWSSWHKEDSIHVGVRCIEMLIESTGMVSLHRQNAGVVGQDSETIELAPEYAEAIATRAGALAGISPMFQPCVVPPKPWTGITGGGYWAAGRKPLQLVRTRSLAALRRYEEVSMPEVIKAVNIAQNTAWRINKKVLDVANTITQWQHCPVADVPAMDRGEMPARPLDIDTNEIALKAWKKEASAFYRKDKARVSRRLSMEFMLSQANKFANYEAIWFPQNMDWRGRVYAVPMFNPQGNDMTKGLLTFAQEKPIGEDGFYWLKIHGANTAGVDKVPFPQRIKFVEDNHTNIMECAKAPLENTWWAEQDSPFCFLAFCFEYAGVINSGLSYNCSLPLAFDGSCSGLQHFSAMLRDEIGGKAVNLLPSAEYQDIYRIVSDKVNEMLKQDLINGTSTTVETVTDKKTGEITQRTKYGTKVMAQWWLEHGVNRSVTKRSVMTLVYGSKEFGFRDQVLSDTIQPAIDNGKGDMFLNPNQAAGYMAKLIWNAVSGTVVAAVEAMNWLKSAAKLLAAEVKDPKTDTVLRGRCAVHWVTPDGFPVWQEYKKPIQTRLNLMFLGQFRLQPTINTNKDSEIDAHKQESGIAPNFVHSQDGNHLRMTVVWAHEKYGIESFALIHDSFGTIPADAANLFKAVRETFVDTYESCDVLADFYDQFADQLHESQRDKMPALPAKGNLNLRDILKSDFAFA

SEQ ID NO: 1291 - DNA, 2670 bp, synthetic construct
  misc_feature 1..2670: note = Variant of RNA polymerase
  source 1..2670: mol_type = other DNA
atgcaccatcaccatcaccatatgaacacgattaacattgctaagaacgacttctctgacatcgaactggctgctatcccgttcaacactctggctgaccattacggtgagcgtttagctcgcgaacagttggcccttgagcatgagtcttacgagatgggtgaagcacgcttccgcaagatgtttgagcgtcaacttaaagctggtgaggttgcggataacgctgccgccaagcctctcatcactaccctactccctaagatgattgcacgcatcaacgactggtttgaggaagtgaaagctaagcgcggcaagcgcccgacagccttccagttcctgcaagaaatcaagccggaagccgtagcgtacatcaccattaagaccactctggcttgcctaaccagtgcggacaatacaaccgttcaggctgtagcaagcgcaatcggtcgggccattgaggacgaggctcgcttcggtcgtatccgtgaccttgaagctaagcacttcaagaagaacgttgaggaacaactcaacaagcgcgtagggcacgtctacaagaaagcatttatgcaagttgtcgagcacgacatgctctctaagggtctactcggtggcgaggcgtggtcttcgtggcataaggaagactctattcatgtaggagtacgctgcatcgagatgctcattgagtcaaccggaatggttagcttacaccgccaaaatgctggcgtagtaggtcaagactctgagactatcgaactcgcacctgaatacgctgaggctatcgcaacccgtgcaggtgcgctggctggcatctctccgatgttccaaccttgcgtagttcctcctaagccgtggactggcattactggtggtggctattgggctgcggggcgcaaacccctgcagttagtacgtactcgcagtctggcggcgcttcgccgctatgaagaagtgtcgatgccggaggtcatcaaagcaatcaacattgcgcagaatacagcatggcgtattaacaagaaagttctcgacgtagcgaataccatcacccaatggcagcactgtccagtcgcggatgtgcctgcgatggatcgtggcgaaatgccagctcgtccgttggacatcgataccaacgagattgcacttaaagcgtggaagaaagaagcttccgcgttctaccgcaaagacaaagcacgcgttagccgtcgtctgtcaatggagtttatgttatctcaggcgaacaagtttgcgaattatgaggcaatctggtttccgcaaaacatggattggcgtgggcgcgtgtacgctgtcccgatgttcaatcctcagggcaacgatatgacgaaaggcctgctgacctttgcgcaggagaaacccattggtgaagacggcttctattggctcaagattcatggcgcaaatacagctggagtggataaagtaccgtttccacaacgcatcaaatttgttgaggataaccatacgaatattatggaatgcgcgaaagcaccgctggaaaacacttggtgggcggaacaggactcgccgttctgttttctggcgttctgctttgagtatgctggcgtcatcaatagtggtctgtcgtacaactgtagcttgcctctggcatttgatggtagttgctccggcctgcaacatttctcagcgatgttacgcgacgaaattggcggcaaagctgtgaatctcctcccatctgcggaataccaggatatttatcgtatcgtcagcgacaaagttaacgagatgctgaaacaagatctgattaacggtacctctaccaccgtggaaacggtgactgataagaagacaggcgaaattacccaacgcacgaaatacgggaccaaagttatggcacagtggtggttagaacacggtgtgaatcgtggcgtcacgaaacgctcggttatgactttggtgtatgggagcaaagagtttggattccgcgatcaagtgctgagtgacaccattcaaccggcgatcgataacggcaaaggtgacatgtttctgaatccgaatcaggctgctggttacatggcgaaactgatctggaacgcagtgtccgggaccgtagtcgcagcagttgaggcgatgaactggctgaaaagtgcggcgaaattacttgctgctgaagtgaaggatcctaagacggatacagttctgcgtggccgctgcgcagtacattgggtgactcccgacggcttccctgtgtggcaggaatacaagaagcctattcagacgcgcttgaacctgatgttcctcggtcagttccgcttacagcctaccattaacaccaacaaagatagcgagattgatgcacacaaacaggagtctggtatcgctcctaactttgtacacagccaagacggtaaccaccttcgtatgactgtagtgtgggcacacgagaagtacggaatcgaatcttttgcactgattcacgactccttcggtaccattccggctgacgctgcgaacctgttcaaagcagtgcgcgaaactttcgttgacacatatgagtcttgtgatgtactggctgatttctacgaccagttcgctgaccagttgcacgagtctcaacgcgacaaaatgccagcacttccggctaaaggtaacttgaacctccgtgacatcttaaaatcggacttcgcgttcgcg

SEQ ID NO: 1292 - protein, 890 aa, synthetic construct
  REGION 1..890: note = Variant of RNA polymerase
MHHHHHHMNTINIAKNDFSDIELAAIPFNTLADHYGERLAREQLALEHESYEMGEARFRKMFERQLKAGEVADNAAAKPLITTLLPKMIARINDWFEEVKAKRGKRPTAFQFLQEIKPEAVAYITIKTTLACLTSADNTTVQAVASAIGRAIEDEARFGRIRDLEAKHFKKNVEEQLNKRVGHVYKKAFMQVVEHDMLSKGLLGGEAWSSWHKEDSIHVGVRCIEMLIESTGMVSLHRQNAGVVGQDSETIELAPEYAEAIATRAGALAGISPMFQPCVVPPKPWTGITGGGYWAAGRKPLQLVRTRSLAALRRYEEVSMPEVIKAINIAQNTAWRINKKVLDVANTITQWQHCPVADVPAMDRGEMPARPLDIDTNEIALKAWKKEASAFYRKDKARVSRRLSMEFMLSQANKFANYEAIWFPQNMDWRGRVYAVPMFNPQGNDMTKGLLTFAQEKPIGEDGFYWLKIHGANTAGVDKVPFPQRIKFVEDNHTNIMECAKAPLENTWWAEQDSPFCFLAFCFEYAGVINSGLSYNCSLPLAFDGSCSGLQHFSAMLRDEIGGKAVNLLPSAEYQDIYRIVSDKVNEMLKQDLINGTSTTVETVTDKKTGEITQRTKYGTKVMAQWWLEHGVNRGVTKRSVMTLVYGSKEFGFRDQVLSDTIQPAIDNGKGDMFLNPNQAAGYMAKLIWNAVSGTVVAAVEAMNWLKSAAKLLAAEVKDPKTDTVLRGRCAVHWVTPDGFPVWQEYKKPIQTRLNLMFLGQFRLQPTINTNKDSEIDAHKQESGIAPNFVHSQDGNHLRMTVVWAHEKYGIESFALIHDSFGTIPADAANLFKAVRETFVDTYESCDVLADFYDQFADQLHESQRDKMPALPAKGNLNLRDILKSDFAFA

SEQ ID NO: 1293 - DNA, 2670 bp, synthetic construct
  misc_feature 1..2670: note = Variant of RNA polymerase
  source 1..2670: mol_type = other DNA
atgcaccatcaccatcaccatatgaacacgattaacattgctaagaacgacttctctgacatcgaactggctgctatcccgttcaacactctggctgaccattacggtgagcgtttagctcgcgaacagttggcccttgagcatgagtcttacgagatgggtgaagcacgcttccgcaagatgtttgagcgtcaacttaaagctggtgaggttgcggataacgctgccgccaagcctctcatcactaccctactccctaagatgattgcacgcatcaacgactggtttgaggaagtgaaagctaagcgcggcaagcgcccgacagccttccagttcctgcaagaaatcaagccggaagccgtagcgtacatcaccattaagaccactctggcttgcctaaccagtgcggacaatacaaccgttcaggctgtagcaagcgcaatcggtcgggccattgaggacgaggctcgcttcggtcgtatccgtgaccttgaagctaagcacttcaagaagaacgttgaggaacaactcaacaagcgcgtagggcacgtctacaagaaagcatttatgcaagttgtcgagcacgacatgctctctaagggtctactcggtggcgaggcgtggtcttcgtggcataaggaagactctattcatgtaggagtacgctgcatcgagatgctcattgagtcaaccggaatggttagcttacaccgccaaaatgctggcgtagtaggtcaagactctgagactatcgaactcgcacctgaatacgctgaggctatcgcaacccgtgcaggtgcgctggctggcatctctccgatgttccaaccttgcgtagttcctcctaagccgtggactggcattactggtggtggctattgggctaacgggcgcaaacccctgcagttagtacgtactcgcagtctggcggcgcttcgccgctatgaagaagtgtcgatgccggaggtcatcaaagcagtcaacattgcgcagaatacagcatggcgtattaacaagaaagttctcgacgtagcgaataccatcacccaatggcagcactgtccagtcgcggatgtgcctgcgatggatcgtggcgaaatgccagctcgtccgttggacatcgataccaacgagattgcacttaaagcgtggaagaaagaagcttccgcgttctaccgcaaagacaaagcacgcgttagccgtcgtctgtcaatggagtttatgttatctcaggcgaacaagtttgcgaattatgaggcaatctggtttccgcaaaacatggattggcgtgggcgcgtgtacgctgtcccgatgttcaatcctcagggcaacgatatgacgaaaggcctgctgacctttgcgcaggagaaacccattggtgaagacggcttctattggctcaagattcatggcgcaaatacagctggagtggataaagtaccgtttccacaacgcatcaaatttgttgaggataaccatacgaatattatggaatgcgcgaaagcaccgctggaaaacacttggtgggcggaacaggactcgccgttctgttttctggcgttctgctttgagtatgctggcgtcatcaatagtggtctgtcgtacaactgtagcttgcctctggcatttgatggtagttgctccggcctgcaacatttctcagcgatgttacgcgacgaaattggcggcaaagctgtgaatctcctcccatctgcggaataccaggatatttatcgtatcgtcagcgacaaagttaacgagatgctgaaacaagatctgattaacggtacctctaccaccgtggaaacggtgactgataagaagacaggcgaaattacccaacgcacgaaatacgggaccaaagttatggcacagtggtggttagaacacggtgtgaatcgtggcgtcacgaaacgctcggttatgactttggtgtatgggagcaaagagtttggattccgcgatcaagtgctgagtgacaccattcaaccggcgatcgataacggcaaaggtgacatgtttctgaatccgaatcaggctgctggttacatggcgaaactgatctggaacgcagtgtccgggaccgtagtcgcagcagttgaggcgatgaactggctgaaaagtgcggcgaaattacttgctgctgaagtgaaggatcctaagacggatacagttctgcgtggccgctgcgcagtacattgggtgactcccgacggcttccctgtgtggcaggaatacaagaagcctattcagacgcgcttgaacctgatgttcctcggtcagttccgcttacagcctaccattaacaccaacaaagatagcgagattgatgcacacaaacaggagtctggtatcgctcctaactttgtacacagccaagacggtaaccaccttcgtatgactgtagtgtgggcacacgagaagtacggaatcgaatcttttgcactgattcacgactccttcggtaccattccggctgacgctgcgaacctgttcaaagcagtgcgcgaaactttcgttgacacatatgagtcttgtgatgtactggctgatttctacgaccagttcgctgaccagttgcacgagtctcaacgcgacaaaatgccagcacttccggctaaaggtaacttgaacctccgtgacatcttaaaatcggacttcgcgttcgcg

SEQ ID NO: 1294 - protein, 890 aa, synthetic construct
  REGION 1..890: note = Variant of RNA polymerase
MHHHHHHMNTINIAKNDFSDIELAAIPFNTLADHYGERLAREQLALEHESYEMGEARFRKMFERQLKAGEVADNAAAKPLITTLLPKMIARINDWFEEVKAKRGKRPTAFQFLQEIKPEAVAYITIKTTLACLTSADNTTVQAVASAIGRAIEDEARFGRIRDLEAKHFKKNVEEQLNKRVGHVYKKAFMQVVEHDMLSKGLLGGEAWSSWHKEDSIHVGVRCIEMLIESTGMVSLHRQNAGVVGQDSETIELAPEYAEAIATRAGALAGISPMFQPCVVPPKPWTGITGGGYWANGRKPLQLVRTRSLAALRRYEEVSMPEVIKAVNIAQNTAWRINKKVLDVANTITQWQHCPVADVPAMDRGEMPARPLDIDTNEIALKAWKKEASAFYRKDKARVSRRLSMEFMLSQANKFANYEAIWFPQNMDWRGRVYAVPMFNPQGNDMTKGLLTFAQEKPIGEDGFYWLKIHGANTAGVDKVPFPQRIKFVEDNHTNIMECAKAPLENTWWAEQDSPFCFLAFCFEYAGVINSGLSYNCSLPLAFDGSCSGLQHFSAMLRDEIGGKAVNLLPSAEYQDIYRIVSDKVNEMLKQDLINGTSTTVETVTDKKTGEITQRTKYGTKVMAQWWLEHGVNRGVTKRSVMTLVYGSKEFGFRDQVLSDTIQPAIDNGKGDMFLNPNQAAGYMAKLIWNAVSGTVVAAVEAMNWLKSAAKLLAAEVKDPKTDTVLRGRCAVHWVTPDGFPVWQEYKKPIQTRLNLMFLGQFRLQPTINTNKDSEIDAHKQESGIAPNFVHSQDGNHLRMTVVWAHEKYGIESFALIHDSFGTIPADAANLFKAVRETFVDTYESCDVLADFYDQFADQLHESQRDKMPALPAKGNLNLRDILKSDFAFA

SEQ ID NO: 1295 - DNA, 2670 bp, synthetic construct
  misc_feature 1..2670: note = Variant of RNA polymerase
  source 1..2670: mol_type = other DNA
atgcaccatcaccatcaccatatgaacacgattaacattgctaagaacgacttctctgacatcgaactggctgctatcccgttcaacactctggctgaccattacggtgagcgtttagctcgcgaacagttggcccttgagcatgagtcttacgagatgggtgaagcacgcttccgcaagatgtttgagcgtcaacttaaagctggtgaggttgcggataacgctgccgccaagcctctcatcactaccctactccctaagatgattgcacgcatcaacgactggtttgaggaagtgaaagctaagcgcggcaagcgcccgacagccttccagttcctgcaagaaatcaagccggaagccgtagcgtacatcaccattaagaccactctggcttgcctaaccagtgcggacaatacaaccgttcaggctgtagcaagcgcaatcggtcgggccattgaggacgaggctcgcttcggtcgtatccgtgaccttgaagctaagcacttcaagaagaacgttgaggaacaactcaacaagcgcgtagggcacgtctacaagaaagcatttatgcaagttgtcgagcacgacatgctctctaagggtctactcggtggcgaggcgtggtcttcgtggcataaggaagactctattcatgtaggagtacgctgcatcgagatgctcattgagtcaaccggaatggttagcttacaccgccaaaatgctggcgtagtaggtcaagactctgagactatcgaactcgcacctgaatacgctgaggctatcgcaacccgtgcaggtgcgctggctggcatctctccgatgttccaaccttgcgtagttcctcctaagccgtggactggcattactggtggtggctattgggctgcggggcgcaaacccctgcagttagtacgtactcgcagtctggcggcgcttcgccgctatgaagaagtgtcgatgccggaggtcatcaaagcagtcaacattgcgcagaatacagcatggcgtattaacaagaaagttctcgacgtagcgaataccatcacccaatggcagcactgtccagtcgcggatgtgcctgcgatggatcgtggcgaaatgccagctcgtccgttggacatcgataccaacgagattgcacttaaagcgtggaagaaagaagcttccgcgttctaccgcaaagacaaagcacgcgtgagccgtcgtctgtcgatggagtttatgttatctcaggcgaacaagtttgcgaattatgaggcaatctggtttccgcaaaacatggattggcgtgggcgcgtgtacgctgtcccgatgttcaatcctcagggcaacgatatgacgaaaggcctgctgacctttgcgcaggagaaacccattggtgaagacggcttctattggctcaagattcatggcgcaaatacagctggagtggataaagtaccgtttccacaacgcatcaaatttgttgaggataaccatacgaatattatggaatgcgcgaaagcaccgctggaaaacacttggtgggcggaacaggactcgccgttctgctttctggcgttctgctttgagtatgctggcgtcatcaatagtggtctgtcgtacaactgtagcttgcctctggcatttgatggtagttgctccggcctgcaacatttctcagcgatgttacgcgacgaaattggcggcaaagctgtgaatctcctcccatctgcggaataccaggatatttatcgtatcgtcagcgacaaagttaacgagatgctgaaacaagatctgattaacggtacctctaccaccgtggaaacggtgactgataagaagacaggcgaaattacccaacgcacgaaatacgggaccaaagttatggcacagtggtggttagaacacggtgtgaatcgtggcgtcacgaaacgctcggttatgactttggtgtatgggagcaaagagtttggattccgcgatcaagtgctgagtgacaccattcaaccggcgatcgataacggcaaaggtgacatgtttctgaatccgaatcaggctgctggttacatggcgaaactgatctggaacgcagtgtccgggaccgtagtcgcagcagttgaggcgatgaactggctgaaaagtgcggcgaaattacttgctgctgaagtgaaggatcgtaagacggatacagttctgcgtggccgctgcgcagtacattgggtgactcccgacggcttccctgtgtggcaggaatacaagaagcctattcagacgcgcttgaacctgatgttcctcggtcagttccgcttacagcctaccattaacaccaacaaagatagcgagattgatgcacacaaacaggagtctggtatcgctcctaactttgtacacagccaagacggtaaccaccttcgtatgactgtagtgtgggcacacgagaagtacggaatcgaatcttttgcactgattcacgactccttcggtaccattccggctgacgctgcgaacctgttcaaagcagtgcgcgaaactttcgttgacacatatgagtcttgtgatgtactggctgatttctacgaccagttcgctgaccagttgcacgagtctcaacgcgacaaaatgccagcacttccggctaaaggtaacttgaacctccgtgacatcttaaaatcggacttcgcgttcgcg

SEQ ID NO: 1296 - protein, 890 aa, synthetic construct
  REGION 1..890: note = Variant of RNA polymerase
MHHHHHHMNTINIAKNDFSDIELAAIPFNTLADHYGERLAREQLALEHESYEMGEARFRKMFERQLKAGEVADNAAAKPLITTLLPKMIARINDWFEEVKAKRGKRPTAFQFLQEIKPEAVAYITIKTTLACLTSADNTTVQAVASAIGRAIEDEARFGRIRDLEAKHFKKNVEEQLNKRVGHVYKKAFMQVVEHDMLSKGLLGGEAWSSWHKEDSIHVGVRCIEMLIESTGMVSLHRQNAGVVGQDSETIELAPEYAEAIATRAGALAGISPMFQPCVVPPKPWTGITGGGYWAAGRKPLQLVRTRSLAALRRYEEVSMPEVIKAVNIAQNTAWRINKKVLDVANTITQWQHCPVADVPAMDRGEMPARPLDIDTNEIALKAWKKEASAFYRKDKARVSRRLSMEFMLSQANKFANYEAIWFPQNMDWRGRVYAVPMFNPQGNDMTKGLLTFAQEKPIGEDGFYWLKIHGANTAGVDKVPFPQRIKFVEDNHTNIMECAKAPLENTWWAEQDSPFCFLAFCFEYAGVINSGLSYNCSLPLAFDGSCSGLQHFSAMLRDEIGGKAVNLLPSAEYQDIYRIVSDKVNEMLKQDLINGTSTTVETVTDKKTGEITQRTKYGTKVMAQWWLEHGVNRGVTKRSVMTLVYGSKEFGFRDQVLSDTIQPAIDNGKGDMFLNPNQAAGYMAKLIWNAVSGTVVAAVEAMNWLKSAAKLLAAEVKDRKTDTVLRGRCAVHWVTPDGFPVWQEYKKPIQTRLNLMFLGQFRLQPTINTNKDSEIDAHKQESGIAPNFVHSQDGNHLRMTVVWAHEKYGIESFALIHDSFGTIPADAANLFKAVRETFVDTYESCDVLADFYDQFADQLHESQRDKMPALPAKGNLNLRDILKSDFAFA

SEQ ID NO: 1297 - DNA, 2670 bp, synthetic construct
  misc_feature 1..2670: note = Variant of RNA polymerase
  source 1..2670: mol_type = other DNA
atgcaccatcaccatcaccatatgaacacgattaacattgctaagaacgacttctctgacatcgaactggctgctatcccgttcaacactctggctgaccattacggtgagcgtttagctcgcgaacagttggcccttgagcatgagtcttacgagatgggtgaagcacgcttccgcaagatgtttgagcgtcaacttaaagctggtgaggttgcggataacgctgccgccaagcctctcatcactaccctactccctaagatgattgcacgcatcaacgactggtttgaggaagtgaaagctaagcgcggcaagcgcccgacagccttccagttcctgcaagaaatcaagccggaagccgtagcgtacatcaccattaagaccactctggcttgcctaaccagtgcggacaatacaaccgttcaggctgtagcaagcgcaatcggtcgggccattgaggacgaggctcgcttcggtcgtatccgtgaccttgaagctaagcacttcaagaagaacgttgaggaacaactcaacaagcgcgtagggcacgtctacaagaaagcatttatgcaagttgtcgagcacgacatgctctctaagggtctactcggtggcgaggcgtggtcttcgtggcataaggaagactctattcatgtaggagtacgctgcatcgagatgctcattgagtcaaccggaatggttagcttacaccgccaaaatgctggcgtagtaggtcaagactctgagactatcgaactcgcacctgaatacgctgaggctatcgcaacccgtgcaggtgcgctggctggcatctctccgatgttccaaccttgcgtagttcctcctaagccgtggactggcattactggtggtggctattgggctgcggggcgcaaacccctgcagttagtacgtactcgcagtaaagcggcgcttcgccgctatgaagaagtgtcgatgccggaggtcatcaaagcagtcaacattgcgcagaatacagcatggcgtattaacaagaaagttctcgacgtagcgaataccatcacccaatggcagcactgtccagtcgcggatgtgcctgcgatggatcgtggcgaaatgccagctcgtccgttggacatcgataccaacgagattgcacttaaagcgtggaagaaagaagcttccgcgttctaccgcaaagacaaagcacgcgttagccgtcgtctgtcaatggagtttatgttatctcaggcgaacaagtttgcgaattatgaggcaatctggtttccgcaaaacatggattggcgtgggcgcgtgtacgctgtcccgatgttcaatcctcagggcaacgatatgacgaaaggcctgctgacctttgcgcaggagaaacccattggtgaagacggcttctattggctcaagattcatggcgcaaatacagctggagtggataaagtaccgtttccacaacgcatcaaatttgttgaggataaccatacgaatattatggaatgcgcgaaagcaccgctggaaaacacttggtgggcggaacaggactcgccgttctgttttctggcgttctgctttgagtatgctggcgtcatcaatagtggtctgtcgtacaactgtagcttgcctctggcatttgatggtagttgctccggcctgcaacatttctcagcgatgttacgcgacgaaattggcggcaaagctgtgaatctcctcccatctgcggaataccaggatatttatcgtatcgtcagcgacaaagttaacgagatgctgaaacaagatctgattaacggtacctctaccaccgtggaaacggtgactgataagaagacaggcgaaattacccaacgcacgaaatacgggaccaaagttatggcacagtggtggttagaacacggtgtgaatcgtggcgtcacgaaacgctcggttatgactttggtgtatgggagcaaagagtttggattccgcgatcaagtgctgagtgacaccattcaaccggcgatcgataacggcaaaggtgacatgtttctgaatccgaatcaggctgctggttacatggcgaaactgatctggaacgcagtgtccgggaccgtagtcgcagcagttgaggcgatgaactggctgaaaagtgcggcgaaattacttgctgctgaagtgaaggatcctaagacggatacagttctgcgtggccgctgcgcagtacattgggtgactcccgacggcttccctgtgtggcaggaatacaagaagcctattcagacgcgcttgaacctgatgttcctcggtcagttccgcttacagcctaccattaacaccaacaaagatagcgagattgatgcacacaaacaggagtctggtatcgctcctaactttgtacacagccaagacggtaaccaccttcgtatgactgtagtgtgggcacacgagaagtacggaatcgaatcttttgcactgattcacgactccttcggtaccattccggctgacgctgcgaacctgttcaaagcagtgcgcgaaactttcgttgacacatatgagtcttgtgatgtactggctgatttctacgaccagttcgctgaccagttgcacgagtctcaacgcgacaaaatgccagcacttccggctaaaggtaacttgaacctccgtgacatcttaaaatcggacttcgcgttcgcg

SEQ ID NO: 1298 - protein, 890 aa, synthetic construct
  REGION 1..890: note = Variant of RNA polymerase
MHHHHHHMNTINIAKNDFSDIELAAIPFNTLADHYGERLAREQLALEHESYEMGEARFRKMFERQLKAGEVADNAAAKPLITTLLPKMIARINDWFEEVKAKRGKRPTAFQFLQEIKPEAVAYITIKTTLACLTSADNTTVQAVASAIGRAIEDEARFGRIRDLEAKHFKKNVEEQLNKRVGHVYKKAFMQVVEHDMLSKGLLGGEAWSSWHKEDSIHVGVRCIEMLIESTGMVSLHRQNAGVVGQDSETIELAPEYAEAIATRAGALAGISPMFQPCVVPPKPWTGITGGGYWAAGRKPLQLVRTRSKAALRRYEEVSMPEVIKAVNIAQNTAWRINKKVLDVANTITQWQHCPVADVPAMDRGEMPARPLDIDTNEIALKAWKKEASAFYRKDKARVSRRLSMEFMLSQANKFANYEAIWFPQNMDWRGRVYAVPMFNPQGNDMTKGLLTFAQEKPIGEDGFYWLKIHGANTAGVDKVPFPQRIKFVEDNHTNIMECAKAPLENTWWAEQDSPFCFLAFCFEYAGVINSGLSYNCSLPLAFDGSCSGLQHFSAMLRDEIGGKAVNLLPSAEYQDIYRIVSDKVNEMLKQDLINGTSTTVETVTDKKTGEITQRTKYGTKVMAQWWLEHGVNRGVTKRSVMTLVYGSKEFGFRDQVLSDTIQPAIDNGKGDMFLNPNQAAGYMAKLIWNAVSGTVVAAVEAMNWLKSAAKLLAAEVKDPKTDTVLRGRCAVHWVTPDGFPVWQEYKKPIQTRLNLMFLGQFRLQPTINTNKDSEIDAHKQESGIAPNFVHSQDGNHLRMTVVWAHEKYGIESFALIHDSFGTIPADAANLFKAVRETFVDTYESCDVLADFYDQFADQLHESQRDKMPALPAKGNLNLRDILKSDFAFA

SEQ ID NO: 1299 - DNA, 2670 bp, synthetic construct
  misc_feature 1..2670: note = Variant of RNA polymerase
  source 1..2670: mol_type = other DNA
atgcaccatcaccatcaccatatgaacacgattaacattgctaagaacgacttctctgacatcgaactggctgctatcccgttcaacactctggctgaccattacggtgagcgtttagctcgcgaacagttggcccttgagcatgagtcttacgagatgggtgaagcacgcttccgcaagatgtttgagcgtcaacttaaagctggtgaggttgcggataacgctgccgccaagcctctcatcactaccctactccctaagatgattgcacgcatcaacgactggtttgaggaagtgaaagctaagcgcggcaagcgcccgacagccttccagttcctgcaagaaatcaagccggaagccgtagcgtacatcaccattaagaccactctggcttgcctaaccagtgcggacaatacaaccgttcaggctgtagcaagcgcaatcggtcgggccattgaggacgaggctcgcttcggtcgtatccgtgaccttgaagctaagcacttcaagaagaacgttgaggaacaactcaacaagcgcgtagggcacgtctacaagaaagcatttatgcaagttgtcgagcacgacatgctctctaagggtctactcggtggcgaggcgtggtcttcgtggcataaggaagactctattcatgtaggagtacgctgcatcgagatgctcattgagtcaaccggaatggttagcttacaccgccaaaatgctggcgtagtaggtcaagactctgagactatcgaactcgcacctgaatacgctgaggctatcgcaacccgtgcaggtgcgctggctggcatctctccgatgttccaaccttgcgtagttcctcctaagccgtggactggcattactggtggtggctattgggctgcggggcgcaaacccctgcagttagtacgtactcgcagtctggcggcgcttcgccgctatgaagaagtgtcgatgccggaggtcatcaaagcagtcaacattgcgcagaatacagcatggcgtattaacaagaaagttctcgacgtagcgaataccatcacccaatggcagcactgtccagtcgcggatgtgcctgcgatggatcgtggcgaaatgccagctcgtccgttggacatcgataccaacgagattgcacttaaagcgtggaagaaagaagcttccgcgttctaccgcaaagacaaagcacgcgttagccgtcgtctgtcaatggagtttatgttatctcaggcgaacaagtttgcgaattatgaggcaatctggtttccgcaaaacatggattggcgtgggcgcgtgtacgctgtcccgatgttcaatcctcagggcaacgatatgacgaaaggcctgctgacctttgcgcaggagaaacccattggtgaagacggcttctattggctcaagattcatggcgcaaatacagctggagtggataaagtaccgtttccacaacgcatcaaatttgttgaggataaccatacgaatattatggaatgcgcgaaagcaccgctggaaaacacttggtgggcggaacaggactcgccgttctgttttctggcgttctgctttgagtatgctggcgtcatcaatagtggtctgtcgtacaactgtagcttgcctctggcatttgatggtagttgctccggcctgcaacatttctcagcgatgttacgcgacgaaattggcggcaaagctgtgaatctcctcccatctgcggaataccaggatatttatcgtatcgtcagcgacaaagttaacgagatgctgaaacaagatctgattaacggtacctctaccaccgtggaaacggtgactgataagaagacaggcgaaattacccaacgcacgaaatacgggaccaaagttatggcacagtggtggttagaacacggtgtgaatcgtggcgtcacgaaacgctcggttatgactttggtgtatgggagcaaagagtttggattccgcgatcaagtgctgagtgacaccattcaaccggcgatcgataacggcaaaggtgacatgtttctgaatccgaatcaggctgctggttacatggcgaaactgatctggaacgcagtgtccgggaccgtagtcgcagcagttgaggcgatgaactggctgaaaagtgcggcgaaattacttgctgctgaagtgaaggatcctaagacggggacagttctgcgtggccgctgcgcagtacattgggtgactcccgacggcttccctgtgtggcaggaatacaagaagcctattcagacgcgcttgaacctgatgttcctcggtcagttccgcttacagcctaccattaacaccaacaaagatagcgagattgatgcacacaaacaggagtctggtatcgctcctaactttgtacacagccaagacggtaaccaccttcgtatgactgtagtgtgggcacacgagaagtacggaatcgaatcttttgcactgattcacgactccttcggtaccattccggctgacgctgcgaacctgttcaaagcagtgcgcgaaactttcgttgacacatatgagtcttgtgatgtactggctgatttctacgaccagttcgctgaccagttgcacgagtctcaacgcgacaaaatgccagcacttccggctaaaggtaacttgaacctccgtgacatcttaaaatcggacttcgcgttcgcg

SEQ ID NO: 1300 - protein, 890 aa, synthetic construct
  REGION 1..890: note = Variant of RNA polymerase
MHHHHHHMNTINIAKNDFSDIELAAIPFNTLADHYGERLAREQLALEHESYEMGEARFRKMFERQLKAGEVADNAAAKPLITTLLPKMIARINDWFEEVKAKRGKRPTAFQFLQEIKPEAVAYITIKTTLACLTSADNTTVQAVASAIGRAIEDEARFGRIRDLEAKHFKKNVEEQLNKRVGHVYKKAFMQVVEHDMLSKGLLGGEAWSSWHKEDSIHVGVRCIEMLIESTGMVSLHRQNAGVVGQDSETIELAPEYAEAIATRAGALAGISPMFQPCVVPPKPWTGITGGGYWAAGRKPLQLVRTRSLAALRRYEEVSMPEVIKAVNIAQNTAWRINKKVLDVANTITQWQHCPVADVPAMDRGEMPARPLDIDTNEIALKAWKKEASAFYRKDKARVSRRLSMEFMLSQANKFANYEAIWFPQNMDWRGRVYAVPMFNPQGNDMTKGLLTFAQEKPIGEDGFYWLKIHGANTAGVDKVPFPQRIKFVEDNHTNIMECAKAPLENTWWAEQDSPFCFLAFCFEYAGVINSGLSYNCSLPLAFDGSCSGLQHFSAMLRDEIGGKAVNLLPSAEYQDIYRIVSDKVNEMLKQDLINGTSTTVETVTDKKTGEITQRTKYGTKVMAQWWLEHGVNRGVTKRSVMTLVYGSKEFGFRDQVLSDTIQPAIDNGKGDMFLNPNQAAGYMAKLIWNAVSGTVVAAVEAMNWLKSAAKLLAAEVKDPKTGTVLRGRCAVHWVTPDGFPVWQEYKKPIQTRLNLMFLGQFRLQPTINTNKDSEIDAHKQESGIAPNFVHSQDGNHLRMTVVWAHEKYGIESFALIHDSFGTIPADAANLFKAVRETFVDTYESCDVLADFYDQFADQLHESQRDKMPALPAKGNLNLRDILKSDFAFA

SEQ ID NO: 1301 - DNA, 2670 bp, synthetic construct
  misc_feature 1..2670: note = Variant of RNA polymerase
  source 1..2670: mol_type = other DNA
atgcaccatcaccatcaccatatgaacacgattaacattgctaagaacgacttctctgacatcgaactggctgctatcccgttcaacactctggctgaccattacggtgagcgtttagctcgcgaacagttggcccttgagcatgagtcttacgagatgggtgaagcacgcttccgcaagatgtttgagcgtcaacttaaagctggtgaggttgcggataacgctgccgccaagcctctcatcactaccctactccctaagatgattgcacgcatcaacgactggtttgaggaagtgaaagctaagcgcggcaagcgcccgacagccttccagttcctgcaagaaatcaagccggaagccgtagcgtacatcaccattaagaccactctggcttgcctaaccagtgcggacaatacaaccgttcaggctgtagcaagcgcaatcggtcgggccattgaggacgaggctcgcttcggtcgtatccgtgaccttgaagctaagcacttcaagaagaacgttgaggaacaactcaacaagcgcgtagggcacgtctacaagaaagcatttatgcaagttgtcgagcacgacatgctctctaagggtctactcggtggcgaggcgtggtcttcgtggcataaggaagactctattcatgtaggagtacgctgcatcgagatgctcattgagtcaaccggaatggttagcttacaccgccaaaatgctggcgtagtaggtcaagactctgagactatcgaactcgcacctgaatacgctgaggctatcgcaacccgtgcaggtgcgctggctggcatctctccgatgttccaaccttgcgtagttcctcctaagccgtggactggcattactggtggtggctattgggctgcggggcgcaaacccctgcagttagtacgtactcgcagtctggcggcgcttcgccgctatgaagaagtgtcgatgccggaggtcatcaaagcagtcaacattgcgcagaatacagcatggcgtattaacaagaaagttctcgacgtagcgaataccatcacccaatggcagcactgtccagtcgcggatgtgcctgcgatggatcgtggcgaaatgccagctcgtccgttggacatcgataccaaccctattgcacttaaagcgtggaagaaagaagcttccgcgttctaccgcaaagacaaagcacgcgttagccgtcgtctgtcaatggagtttatgttatctcaggcgaacaagtttgcgaattatgaggcaatctggtttccgcaaaacatggattggcgtgggcgcgtgtacgctgtcccgatgttcaatcctcagggcaacgatatgacgaaaggcctgctgacctttgcgcaggagaaacccattggtgaagacggcttctattggctcaagattcatggcgcaaatacagctggagtggataaagtaccgtttccacaacgcatcaaatttgttgaggataaccatacgaatattatggaatgcgcgaaagcaccgctggaaaacacttggtgggcggaacaggactcgccgttctgttttctggcgttctgctttgagtatgctggcgtcatcaatagtggtctgtcgtacaactgtagcttgcctctggcatttgatggtagttgctccggcctgcaacatttctcagcgatgttacgcgacgaaattggcggcaaagctgtgaatctcctcccatctgcggaataccaggatatttatcgtatcgtcagcgacaaagttaacgagatgctgaaacaagatctgattaacggtacctctaccaccgtggaaacggtgactgataagaagacaggcgaaattacccaacgcacgaaatacgggaccaaagttatggcacagtggtggttagaacacggtgtgaatcgtggcgtcacgaaacgctcggttatgactttggtgtatgggagcaaagagtttggattccgcgatcaagtgctgagtgacaccattcaaccggcgatcgataacggcaaaggtgacatgtttctgaatccgaatcaggctgctggttacatggcgaaactgatctggaacgcagtgtccgggaccgtagtcgcagcagttgaggcgatgaactggctgaaaagtgcggcgaaattacttgctgctgaagtgaaggatcctaagacggatacagttctgcgtggccgctgcgcagtacattgggtgactcccgacggcttccctgtgtggcaggaatacaagaagcctattcagacgcgcttgaacctgatgttcctcggtcagttccgcttacagcctaccattaacaccaacaaagatagcgagattgatgcacacaaacaggagtctggtatcgctcctaactttgtacacagccaagacggtaaccaccttcgtatgactgtagtgtgggcacacgagaagtacggaatcgaatcttttgcactgattcacgactccttcggtaccattccggctgacgctgcgaacctgttcaaagcagtgcgcgaaactttcgttgacacatatgagtcttgtgatgtactggctgatttctacgaccagttcgctgaccagttgcacgagtctcaacgcgacaaaatgccagcacttccggctaaaggtaacttgaacctccgtgacatcttaaaatcggacttcgcgttcgcg

SEQ ID NO: 1302 - protein, 890 aa, synthetic construct
  REGION 1..890: note = Variant of RNA polymerase
MHHHHHHMNTINIAKNDFSDIELAAIPFNTLADHYGERLAREQLALEHESYEMGEARFRKMFERQLKAGEVADNAAAKPLITTLLPKMIARINDWFEEVKAKRGKRPTAFQFLQEIKPEAVAYITIKTTLACLTSADNTTVQAVASAIGRAIEDEARFGRIRDLEAKHFKKNVEEQLNKRVGHVYKKAFMQVVEHDMLSKGLLGGEAWSSWHKEDSIHVGVRCIEMLIESTGMVSLHRQNAGVVGQDSETIELAPEYAEAIATRAGALAGISPMFQPCVVPPKPWTGITGGGYWAAGRKPLQLVRTRSLAALRRYEEVSMPEVIKAVNIAQNTAWRINKKVLDVANTITQWQHCPVADVPAMDRGEMPARPLDIDTNPIALKAWKKEASAFYRKDKARVSRRLSMEFMLSQANKFANYEAIWFPQNMDWRGRVYAVPMFNPQGNDMTKGLLTFAQEKPIGEDGFYWLKIHGANTAGVDKVPFPQRIKFVEDNHTNIMECAKAPLENTWWAEQDSPFCFLAFCFEYAGVINSGLSYNCSLPLAFDGSCSGLQHFSAMLRDEIGGKAVNLLPSAEYQDIYRIVSDKVNEMLKQDLINGTSTTVETVTDKKTGEITQRTKYGTKVMAQWWLEHGVNRGVTKRSVMTLVYGSKEFGFRDQVLSDTIQPAIDNGKGDMFLNPNQAAGYMAKLIWNAVSGTVVAAVEAMNWLKSAAKLLAAEVKDPKTDTVLRGRCAVHWVTPDGFPVWQEYKKPIQTRLNLMFLGQFRLQPTINTNKDSEIDAHKQESGIAPNFVHSQDGNHLRMTVVWAHEKYGIESFALIHDSFGTIPADAANLFKAVRETFVDTYESCDVLADFYDQFADQLHESQRDKMPALPAKGNLNLRDILKSDFAFA

SEQ ID NO: 1303 - DNA, 2670 bp, synthetic construct
  misc_feature 1..2670: note = Variant of RNA polymerase
  source 1..2670: mol_type = other DNA
atgcaccatcaccatcaccatatgaacacgattaacattgctaagaacgacttctctgacatcgaactggctgctatcccgttcaacactctggctgaccattacggtgagcgtttagctcgcgaacagttggcccttgagcatgagtcttacgagatgggtgaagcacgcttccgcaagatgtttgagcgtcaacttaaagctggtgaggttgcggataacgctgccgccaagcctctcatcactaccctactccctaagatgattgcacgcatcaacgactggtttgaggaagtgaaagctaagcgcggcaagcgcccgacagccttccagttcctgcaagaaatcaagccggaagccgtagcgtacatcaccattaagaccactctggcttgcctaaccagtgcggacaatacaaccgttcaggctgtagcaagcgcaatcggtcgggccattgaggacgaggctcgcttcggtcgtatccgtgaccttgaagctaagcacttcaagaagaacgttgaggaacaactcaacaagcgcgtagggcacgtctacaagaaagcatttatgcaagttgtcgagcacgacatgctctctaagggtctactcggtggcgaggcgtggtcttcgtggcataaggaagactctattcatgtaggagtacgctgcatcgagatgctcattgagtcaaccggaatggttagcttacaccgccaaaatgctggcgtagtaggtcaagactctgagactatcgaactcgcacctgaatacgctgaggctatcgcaacccgtgcaggtgcgctggctggcatctctccgatgttccaaccttgcgtagttcctcctaagccgtggactggcattactggtggtggctattgggctgcggggcgcaaacccctgcagttagtacgtactcgcagtctggcggcgcttcgccgctatgaagaagtgtcgatgccggaggtcatcaaagcagtcaacattgcgcagaatacagcatggcgtattaacaagaaagttctcgacgtagcgaataccatcacccaatggcagcactgtccagtcgcggatgtgcctgcgatggatcgtggcgaaatgccagctcgtccgttggacatcgataccaacgagattgcacttaaagcgtggaagaaagaagcttccgcgttctaccgcaaagacaaagcacgcgttagccgtcgtctgtcaatggagtttatgttatctcaggcgaacaagtttgcgaattatgaggcaatctggtttccgcaaaacatggattggcgtgggcgcgtgtacgctgtcccgatgttcaatcctcagggcaacgatatgacgaaaggcctgctgacctttgcgcaggagaaacccattggtgaagacggcttctattggctcaagattcatggcgcaaatacagctggagtggataaagtaccgtttccacaacgcatcaaatttgttgaggataaccatacgaatattatggaatgcgcgaaagcaccgctggaaaacacttggtgggcggaacaggactcgccgttctgttttctggcgttctgctttgagtatgctggcgtcatcaatagtggtctgtcgtacaactgtagcttgcctctggcatttgatggtagttgctccggcctgcaacatttctcagcgatgttacgcgacgaaattggcggcaaagctgtgaatctcctcccatctgcggaataccaggatatttatcgtatcgtcagcgacaaagttaacgagatgctgaaacaagatctgattaacggtacctctaccaccgtggaaacggtgactgataagaagacaggcgaaattacccaacgcacgaaatacgggaccaaagttatggcacagtggtggttagaacacggtgtgaatcgtggcgtcacgaaacgctcggttatgactttggtgtatgggagcaaagagtttggattccgcgatcaagtgctgagtgacaccattcaaccggcgatcgataacggcaaaggtgacatgtttctgaatccgaatcaggctgctggttacatggcgaaactgatctggaactcggtgtccgggaccgtagtcgcagcagttgaggcgatgaactggctgaaaagtgcggcgaaattacttgctgctgaagtgaaggatcctaagacggatacagttctgcgtggccgctgcgcagtacattgggtgactcccgacggcttccctgtgtggcaggaatacaagaagcctattcagacgcgcttgaacctgatgttcctcggtcagttccgcttacagcctaccattaacaccaacaaagatagcgagattgatgcacacaaacaggagtctggtatcgctcctaactttgtacacagccaagacggtaaccaccttcgtatgactgtagtgtgggcacacgagaagtacggaatcgaatcttttgcactgattcacgactccttcggtaccattccggctgacgctgcgaacctgttcaaagcagtgcgcgaaactttcgttgacacatatgagtcttgtgatgtactggctgatttctacgaccagttcgctgaccagttgcacgagtctcaacgcgacaaaatgccagcacttccggctaaaggtaacttgaacctccgtgacatcttaaaatcggacttcgcgttcgcg

SEQ ID NO: 1304 - protein, 890 aa, synthetic construct
  REGION 1..890: note = Variant of RNA polymerase
MHHHHHHMNTINIAKNDFSDIELAAIPFNTLADHYGERLAREQLALEHESYEMGEARFRKMFERQLKAGEVADNAAAKPLITTLLPKMIARINDWFEEVKAKRGKRPTAFQFLQEIKPEAVAYITIKTTLACLTSADNTTVQAVASAIGRAIEDEARFGRIRDLEAKHFKKNVEEQLNKRVGHVYKKAFMQVVEHDMLSKGLLGGEAWSSWHKEDSIHVGVRCIEMLIESTGMVSLHRQNAGVVGQDSETIELAPEYAEAIATRAGALAGISPMFQPCVVPPKPWTGITGGGYWAAGRKPLQLVRTRSLAALRRYEEVSMPEVIKAVNIAQNTAWRINKKVLDVANTITQWQHCPVADVPAMDRGEMPARPLDIDTNEIALKAWKKEASAFYRKDKARVSRRLSMEFMLSQANKFANYEAIWFPQNMDWRGRVYAVPMFNPQGNDMTKGLLTFAQEKPIGEDGFYWLKIHGANTAGVDKVPFPQRIKFVEDNHTNIMECAKAPLENTWWAEQDSPFCFLAFCFEYAGVINSGLSYNCSLPLAFDGSCSGLQHFSAMLRDEIGGKAVNLLPSAEYQDIYRIVSDKVNEMLKQDLINGTSTTVETVTDKKTGEITQRTKYGTKVMAQWWLEHGVNRGVTKRSVMTLVYGSKEFGFRDQVLSDTIQPAIDNGKGDMFLNPNQAAGYMAKLIWNSVSGTVVAAVEAMNWLKSAAKLLAAEVKDPKTDTVLRGRCAVHWVTPDGFPVWQEYKKPIQTRLNLMFLGQFRLQPTINTNKDSEIDAHKQESGIAPNFVHSQDGNHLRMTVVWAHEKYGIESFALIHDSFGTIPADAANLFKAVRETFVDTYESCDVLADFYDQFADQLHESQRDKMPALPAKGNLNLRDILKSDFAFA

SEQ ID NO: 1305 - DNA, 2670 bp, synthetic construct
  misc_feature 1..2670: note = Variant of RNA polymerase
  source 1..2670: mol_type = other DNA
atgcaccatcaccatcaccatatgaacacgattaacattgctaagaacgacttctctgacatcgaactggctgctatcccgttcaacactctggctgaccattacggtgagcgtttagctcgcgaacagttggcccttgagcatgagtcttacgagatgggtgaagcacgcttccgcaagatgtttgagcgtcaacttaaagctggtgaggttgcggataacgctgccgccaagcctctcatcactaccctactccctaagatgattgcacgcatcaacgactggtttgaggaagtgaaagctaagcgcggcaagcgcccgacagccttccagttcctgcaagaaatcaagccggaagccgtagcgtacatcaccattaagaccactctggcttgccagaccagtgcggacaatacaaccgttcaggctgtagcaagcgcaatcggtcgggccattgaggacgaggctcgcttcggtcgtatccgtgaccttgaagctaagcacttcaagaagaacgttgaggaacaactcaacaagcgcgtagggcacgtctacaagaaagcatttatgcaagttgtcgagcacgacatgctctctaagggtctactcggtggcgaggcgtggtcttcgtggcataaggaagactctattcatgtaggagtacgctgcatcgagatgctcattgagtcaaccggaatggttagcttacaccgccaaaatgctggcgtagtaggtcaagactctgagactatcgaactcgcacctgaatacgctgaggctatcgcaacccgtgcaggtgcgctggctggcatctctccgatgttccaaccttgcgtagttcctcctaagccgtggactggcattactggtggtggctattgggctgcggggcgcaaacccctgcagttagtacgtactcgcagtctggcggcgcttcgccgctatgaagaagtgtcgatgccggaggtcatcaaagcagtcaacattgcgcagaatacagcatggcgtattaacaagaaagttctcgacgtagcgaataccatcacccaatggcagcactgtccagtcgcggatgtgcctgcgatggatcgtggcgaaatgccagctcgtccgttggacatcgataccaacgagagtgcacttaaagcgtggaagaaagaagcttccgcgttctaccgcaaagacaaagcacgcgtgagccgtcgtctgtcgatggagtttatgttatctcaggcgaacaagtttgcgaattatgaggcaatctggtttccgcaaaacatggattggcgtgggcgcgtgtacgctgtcccgatgttcaatcctcagggcaacgatatgacgaaaggcctgctgacctttgcgcaggagaaacccattggtgaagacggcttctattggctcaagattcatggcgcaaatacagctggagtggataaagtaccgtttccacaacgcatcaaatttgttgaggataaccatacgaatattatggaatgcgcgaaagcaccgctggaaaacacttggtgggcggaacaggactcgccgttctgttttctggcgttctgctttgagtatgctggcgtcatcaatagtggtctgtcgtacaactgtagcttgcctctggcatttgatggtagttgctccggcctgcaacatttctcagcgatgttacgcgacgaaattggcggcaaagctgtgaatctcctcccatctgcggaataccaggatatttatcgtatcgtcagcgacaaagttaacgagatgctgaaacaagatctgattaacggtacctctaccaccgtggaaacggtgactgataagaagacaggcgaaattacccaacgcacgaaatacgggaccaaagttatggcacagtggtggttagaacacggtgtgaatcgtggcgtcacgaaacgctcggttatgactttggtgtatgggagcaaagagtttggattccgcgatcaagtgctgagtgacaccattcaaccggcgatcgataacggcaaaggtgacatgtttctgaatccgaatcaggctgctggttacatggcgaaactgatctggaacgcagtgtccgggaccgtagtcgcagcagttgaggcgatgaactggctgaaaagtgcggcgaaattacttgctgctgaagtgaaggatcctaagacggatacagttctgcgtggccgctgcgcagtacattgggtgactcccgacggcttccctgtgtggcaggaatacaagaagcctattcagacgcgcttgaacctgatgttcctcggtcagttccgcttacagcctaccattaacaccaacaaagatagcgagattgatgcacacaaacaggagtctggtatcgctcctaactttgtacacagccaagacggtaaccaccttcgtatgactgtagtgtgggcacacgagaagtacggaatcgaatcttttgcactgattcacgactccttcggtaccattccggctgacgctgcgaacctgttcaaagcagtgcgcgaaactttcgttgacacatatgagtcttgtgatgtactggctgatttctacgaccagttcgctgaccagttgcacgagtctcaacgcgacaaaatgccagcacttccggctaaaggtaacttgaacctccgtgacatcttaaaatcggacttcgcgttcgcg

SEQ ID NO: 1306 - protein, 890 aa, synthetic construct
  REGION 1..890: note = Variant of RNA polymerase
MHHHHHHMNTINIAKNDFSDIELAAIPFNTLADHYGERLAREQLALEHESYEMGEARFRKMFERQLKAGEVADNAAAKPLITTLLPKMIARINDWFEEVKAKRGKRPTAFQFLQEIKPEAVAYITIKTTLACQTSADNTTVQAVASAIGRAIEDEARFGRIRDLEAKHFKKNVEEQLNKRVGHVYKKAFMQVVEHDMLSKGLLGGEAWSSWHKEDSIHVGVRCIEMLIESTGMVSLHRQNAGVVGQDSETIELAPEYAEAIATRAGALAGISPMFQPCVVPPKPWTGITGGGYWAAGRKPLQLVRTRSLAALRRYEEVSMPEVIKAVNIAQNTAWRINKKVLDVANTITQWQHCPVADVPAMDRGEMPARPLDIDTNESALKAWKKEASAFYRKDKARVSRRLSMEFMLSQANKFANYEAIWFPQNMDWRGRVYAVPMFNPQGNDMTKGLLTFAQEKPIGEDGFYWLKIHGANTAGVDKVPFPQRIKFVEDNHTNIMECAKAPLENTWWAEQDSPFCFLAFCFEYAGVINSGLSYNCSLPLAFDGSCSGLQHFSAMLRDEIGGKAVNLLPSAEYQDIYRIVSDKVNEMLKQDLINGTSTTVETVTDKKTGEITQRTKYGTKVMAQWWLEHGVNRGVTKRSVMTLVYGSKEFGFRDQVLSDTIQPAIDNGKGDMFLNPNQAAGYMAKLIWNAVSGTVVAAVEAMNWLKSAAKLLAAEVKDPKTDTVLRGRCAVHWVTPDGFPVWQEYKKPIQTRLNLMFLGQFRLQPTINTNKDSEIDAHKQESGIAPNFVHSQDGNHLRMTVVWAHEKYGIESFALIHDSFGTIPADAANLFKAVRETFVDTYESCDVLADFYDQFADQLHESQRDKMPALPAKGNLNLRDILKSDFAFA

SEQ ID NO: 1307 - DNA, 2670 bp, synthetic construct
  misc_feature 1..2670: note = Variant of RNA polymerase
  source 1..2670: mol_type = other DNA
atgcaccatcaccatcaccatatgaacacgattaacattgctaagaacgacttctctgacatcgaactggctgctatcccgttcaacactctggctgaccattacggtgagcgtttagctcgcgaacagttggcccttgagcatgagtcttacgagatgggtgaagcacgcttccgcaagatgtttgagcgtcaacttaaagctggtgaggttgcggataacgctgccgccaagcctctcatcactaccctactccctaagatgattgcacgcatcaacgactggtttgaggaagtgaaagctaagcgcggcaagcgcccgacagccttccagttcctgcaagaaatcaagccggaagccgtagcgtacatcaccattaagaccactctggcttgcctaaccagtgcggacaatacaaccgttcaggctgtagcaagcgcaatcggtcgggccattgaggacgaggctcgcttcggtcgtatccgtgaccttgaagctaagcacttcaagaagaacgttgaggaacaactcaacaagcgcgtagggcacgtctacaagaaagcatttatgcaagttgtcgagcacgacatgctctctaagggtctactcggtggcgaggcgtggtcttcgtggcataaggaagactctattcatgtaggagtacgctgcatcgagatgctcattgagtcaaccggaatggttagcttacaccgccaaaatgctggcgtagtaggtcaagactctgagactatcgaactcgcacctgaatacgctgaggctatcgcaacccgtgcaggtgcgctggctggcatctctccgatgttccaaccttgcgtagttcctcctaagccgtggactggcattactggtggtggctattgggctgcggggcgcaaacccctgcagttagtacgtactcgcagtctgaaggcgcttcgccgctatgaagaagtgtcgatgccggaggtcatcaaagcagtcaacattgcgcagaatacagcatggcgtattaacaagaaagttctcgacgtagcgaataccatcacccaatggcagcactgtccagtcgcggatgtgcctgcgatggatcgtggcgaaatgccagctcgtccgttggacatcgataccaacgagattgcacttaaagcgtggaagaaagaagcttccgcgttctaccgcaaagacaaagcacgcgttagccgtcgtctgtcaatggagtttatgttatctcaggcgaacaagtttgcgaattatgaggcaatctggtttccgcaaaacatggattggcgtgggcgcgtgtacgctgtcccgatgttcaatcctcagggcaacgatatgacgaaaggcctgctgacctttgcgcaggagaaacccattggtgaagacggcttctattggctcaagattcatggcgcaaatacagctggagtggataaagtaccgtttccacaacgcatcaaatttgttgaggataaccatacgaatattatggaatgcgcgaaagcaccgctggaaaacacttggtgggcggaacaggactcgccgttctgttttctggcgttctgctttgagtatgctggcgtcatcaatagtggtctgtcgtacaactgtagcttgcctctggcatttgatggtagttgctccggcctgcaacatttctcagcgatgttacgcgacgaaattggcggcaaagctgtgaatctcctcccatctgcggaataccaggatatttatcgtatcgtcagcgacaaagttaacgagatgctgaaacaagatctgattaacggtacctctaccaccgtggaaacggtgactgataagaagacaggcgaaattacccaacgcacgaaatacgggaccaaagttatggcacagtggtggttagaacacggtgtgaatcgtggcgtcacgaaacgctcggttatgactttggtgtatgggagcaaagagtttggattccgcgatcaagtgctgagtgacaccattcaaccggcgatcgataacggcaaaggtgacatgtttctgaatccgaatcaggctgctggttacatggcgaaactgatctggaacgcagtgtccgggaccgtagtcgcagcagttgaggcgatgaactggctgaaaagtgcggcgaaattacttgctgctgaagtgaaggatcctaagacggatacagttctgcgtggccgctgcgcagtacattgggtgactcccgacggcttccctgtgtggcaggaatacaagaagcctattcagacgcgcttgaacctgatgttcctcggtcagttccgcttacagcctaccattaacaccaacaaagatagcgagattgatgcacacaaacaggagtctggtatcgctcctaactttgtacacagccaagacggtaaccaccttcgtatgactgtagtgtgggcacacgagaagtacggaatcgaatcttttgcactgattcacgactccttcggtaccattccggctgacgctgcgaacctgttcaaagcagtgcgcgaaactttcgttgacacatatgagtcttgtgatgtactggctgatttctacgaccagttcgctgaccagttgcacgagtctcaacgcgacaaaatgccagcacttccggctaaaggtaacttgaacctccgtgacatcttaaaatcggacttcgcgttcgcg

SEQ ID NO: 1308 - protein, 890 aa, synthetic construct
  REGION 1..890: note = Variant of RNA polymerase
MHHHHHHMNTINIAKNDFSDIELAAIPFNTLADHYGERLAREQLALEHESYEMGEARFRKMFERQLKAGEVADNAAAKPLITTLLPKMIARINDWFEEVKAKRGKRPTAFQFLQEIKPEAVAYITIKTTLACLTSADNTTVQAVASAIGRAIEDEARFGRIRDLEAKHFKKNVEEQLNKRVGHVYKKAFMQVVEHDMLSKGLLGGEAWSSWHKEDSIHVGVRCIEMLIESTGMVSLHRQNAGVVGQDSETIELAPEYAEAIATRAGALAGISPMFQPCVVPPKPWTGITGGGYWAAGRKPLQLVRTRSLKALRRYEEVSMPEVIKAVNIAQNTAWRINKKVLDVANTITQWQHCPVADVPAMDRGEMPARPLDIDTNEIALKAWKKEASAFYRKDKARVSRRLSMEFMLSQANKFANYEAIWFPQNMDWRGRVYAVPMFNPQGNDMTKGLLTFAQEKPIGEDGFYWLKIHGANTAGVDKVPFPQRIKFVEDNHTNIMECAKAPLENTWWAEQDSPFCFLAFCFEYAGVINSGLSYNCSLPLAFDGSCSGLQHFSAMLRDEIGGKAVNLLPSAEYQDIYRIVSDKVNEMLKQDLINGTSTTVETVTDKKTGEITQRTKYGTKVMAQWWLEHGVNRGVTKRSVMTLVYGSKEFGFRDQVLSDTIQPAIDNGKGDMFLNPNQAAGYMAKLIWNAVSGTVVAAVEAMNWLKSAAKLLAAEVKDPKTDTVLRGRCAVHWVTPDGFPVWQEYKKPIQTRLNLMFLGQFRLQPTINTNKDSEIDAHKQESGIAPNFVHSQDGNHLRMTVVWAHEKYGIESFALIHDSFGTIPADAANLFKAVRETFVDTYESCDVLADFYDQFADQLHESQRDKMPALPAKGNLNLRDILKSDFAFA

SEQ ID NO: 1309 - DNA, 2670 bp, synthetic construct
  misc_feature 1..2670: note = Variant of RNA polymerase
  source 1..2670: mol_type = other DNA
atgcaccatcaccatcaccatatgaacacgattaacattgctaagaacgacttctctgacatcgaactggctgctatcccgttcaacactctggctgaccattacggtgagcgtttagctcgcgaacagttggcccttgagcatgagtcttacgagatgggtgaagcacgcttccgcaagatgtttgagcgtcaacttaaagctggtgaggttgcggataacgctgccgccaagcctctcatcactaccctactccctaagatgattgcacgcatcaacgactggtttgaggaagtgaaagctaagcgcggcaagcgcccgacagccttccagttcctgcaagaaatcaagccggaagccgtagcgtacatcaccattaagaccactctggcttgcctaaccagtgcggacaatacaaccgttcaggctgtagcaagcgcaatcggtcgggccattgaggacgaggctcgcttcggtcgtatccgtgaccttgaagctaagcacttcaagaagaacgttgaggaacaactcaacaagcgcgtagggcacgtctacaagaaagcatttatgcaagttgtcgagcacgacatgctctctaagggtctactcggtggcgaggcgtggtcttcgtggcataaggaagactctattcatgtaggagtacgctgcatcgagatgctcattgagtcaaccggaatggttagcttacaccgccaaaatgctggcgtagtaggtcaagactctgagactatcgaactcgcacctgaatacgctgaggctatcgcaacccgtgcaggtgcgctggctggcatctctccgatgttccaaccttgcgtagttcctcctaagccgtggactggcattactggtggtggctattgggctgcggggcgcaaacccctgcagttagtacgtactcgcagtctggcggcgcttcgccgctatgaagaagtgtcgatgccggaggtcatcaaagcagtcaacattgcgcagaatacagcatggcgtattaacaagaaagttctcgacgtagcgaataccatcacccaatggcagcactgtccagtcgcggatgtgcctgcgatggatcgtggcgaaatgccagctcgtccgttggacatcgataccaacgagattgcacttaaagcgtggaagaaagaagcttccgcgttctaccgcaaagacaaagcacgcgttagccgtcgtctgtcaatggagtttatgttatctcaggcgaacaagtttgcgaattatgaggcaatctggtttccgcaaaacatggattggcgtgggcgcgtgtacgctgtcccgatgttcaatcctcagggcaacgatatgacgaaaggcctgctgacctttgcgcaggagaaacccattggtgaagaaggcttctattggctcaagattcatggcgcaaatacagctggagtggataaagtaccgtttccacaacgcatcaaatttgttgaggataaccatacgaatattatggaatgcgcgaaagcaccgctggaaaacacttggtgggcggaacaggactcgccgttctgttttctggcgttctgctttgagtatgctggcgtcatcaatagtggtctgtcgtacaactgtagcttgcctctggcatttgatggtagttgctccggcctgcaacatttctcagcgatgttacgcgacgaaattggcggcaaagctgtgaatctcctcccatctgcggaataccaggatatttatcgtatcgtcagcgacaaagttaacgagatgctgaaacaagatctgattaacggtacctctaccaccgtggaaacggtgactgataagaagacaggcgaaattacccaacgcacgaaatacgggaccaaagttatggcacagtggtggttagaacacggtgtgaatcgtggcgtcacgaaacgctcggttatgactttggtgtatgggagcaaagagtttggattccgcgatcaagtgctgagtgacaccattcaaccggcgatcgataacggcaaaggtgacatgtttctgaatccgaatcaggctgctggttacatggcgaaactgatctggaacgcagtgtccgggaccgtagtcgcagcagttgaggcgatgaactggctgaaaagtgcggcgaaattacttgctgctgaagtgaaggatcctaagacggatacagttctgcgtggccgctgcgcagtacattgggtgactcccgacggcttccctgtgtggcaggaatacaagaagcctattcagacgcgcttgaacctgatgttcctcggtcagttccgcttacagcctaccattaacaccaacaaagatagcgagattgatgcacacaaacaggagtctggtatcgctcctaactttgtacacagccaagacggtaaccaccttcgtatgactgtagtgtgggcacacgagaagtacggaatcgaatcttttgcactgattcacgactccttcggtaccattccggctgacgctgcgaacctgttcaaagcagtgcgcgaaactttcgttgacacatatgagtcttgtgatgtactggctgatttctacgaccagttcgctgaccagttgcacgagtctcaacgcgacaaaatgccagcacttccggctaaaggtaacttgaacctccgtgacatcttaaaatcggacttcgcgttcgcg

SEQ ID NO: 1310 - protein, 890 aa, synthetic construct
  REGION 1..890: note = Variant of RNA polymerase
MHHHHHHMNTINIAKNDFSDIELAAIPFNTLADHYGERLAREQLALEHESYEMGEARFRKMFERQLKAGEVADNAAAKPLITTLLPKMIARINDWFEEVKAKRGKRPTAFQFLQEIKPEAVAYITIKTTLACLTSADNTTVQAVASAIGRAIEDEARFGRIRDLEAKHFKKNVEEQLNKRVGHVYKKAFMQVVEHDMLSKGLLGGEAWSSWHKEDSIHVGVRCIEMLIESTGMVSLHRQNAGVVGQDSETIELAPEYAEAIATRAGALAGISPMFQPCVVPPKPWTGITGGGYWAAGRKPLQLVRTRSLAALRRYEEVSMPEVIKAVNIAQNTAWRINKKVLDVANTITQWQHCPVADVPAMDRGEMPARPLDIDTNEIALKAWKKEASAFYRKDKARVSRRLSMEFMLSQANKFANYEAIWFPQNMDWRGRVYAVPMFNPQGNDMTKGLLTFAQEKPIGEEGFYWLKIHGANTAGVDKVPFPQRIKFVEDNHTNIMECAKAPLENTWWAEQDSPFCFLAFCFEYAGVINSGLSYNCSLPLAFDGSCSGLQHFSAMLRDEIGGKAVNLLPSAEYQDIYRIVSDKVNEMLKQDLINGTSTTVETVTDKKTGEITQRTKYGTKVMAQWWLEHGVNRGVTKRSVMTLVYGSKEFGFRDQVLSDTIQPAIDNGKGDMFLNPNQAAGYMAKLIWNAVSGTVVAAVEAMNWLKSAAKLLAAEVKDPKTDTVLRGRCAVHWVTPDGFPVWQEYKKPIQTRLNLMFLGQFRLQPTINTNKDSEIDAHKQESGIAPNFVHSQDGNHLRMTVVWAHEKYGIESFALIHDSFGTIPADAANLFKAVRETFVDTYESCDVLADFYDQFADQLHESQRDKMPALPAKGNLNLRDILKSDFAFA

SEQ ID NO: 1311 - DNA, 2670 bp, synthetic construct
  misc_feature 1..2670: note = Variant of RNA polymerase
  source 1..2670: mol_type = other DNA
atgcaccatcaccatcaccatatgaacacgattaacattgctaagaacgacttctctgacatcgaactggctgctatcccgttcaacactctggctgaccattacggtgagcgtttagctcgcgaacagttggcccttgagcatgagtcttacgagatgggtgaagcacgcttccgcaagatgtttgagcgtcaacttaaagctggtgaggttgcggataacgctgccgccaagcctctcatcactaccctactccctaagatgattgcacgcatcaacgactggtttgaggaagtgaaagctaagcgcggcaagcgcccgacagccttccagttcctgcaagaaatcaagccggaagccgtagcgtacatcaccattaagaccactctggcttgcctaaccagtgcggacaatacaaccgttcaggctgtagcaagcgcaatcggtcgggccattgaggacgaggctcgcttcggtcgtatccgtgaccttgaagctaagcacttcaagaagaacgttgaggaacaactcaacaagcgcgtagggcacgtctacaagaaagcatttatgcaagttgtcgagcacgacatgctctctaagggtctactcggtggcgaggcgtggtcttcgtggcataaggaagactctattcatgtaggagtacgctgcatcgagatgctcattgagtcaaccggaatggttagcttacaccgccaaaatgctggcgtagtaggtcaagactctgagactatcgaactcgcacctgaatacgctgaggctatcgcaacccgtgcaggtgcgctggctggcatctctccgatgttccaaccttgcgtagttcctcctaagccgtggactggcattactggtggtggctattgggctgcggggcgcaaacccctgcagttagtacgtactcgcagtctggcggcgcttcgccgctatgaagaagtgtcgatgccggaggtcatcaaagcagtcaacattgcgcagaatacagcatggcgtattaacaagaaagttctcgacgtagcgaataccatcacccaatggcagcactgtccagtcgcggatgtgcctgcgatggatcgtggcgaaatgccagctcgtccgttggacatcgataccaacgagattgcacttaaagcgtggaagaaagaagcttccgcgttctaccgcaaagacaaagcacgcgttagccgtcgtctgtcaatggagtttatgttatctcaggcgaacaagtttgcgaattatgaggcaatctggtttccgcaaaacatggattggcgtgggcgcgtgtacgctgtcccgatgttcaatcctcagggcaacgatatgacgaaaggcctgctgacctttgcgcaggagaaacccattggtgaagacggcttctattggctcaagattcatggcgcaaatacagctggagtggataaagtaccgtttccacaacgcatcaaatttgttgaggataaccatacgaatattatggaatgcgcgaaaagtccgctggaaaacacttggtgggcggaacaggactcgccgttctgttttctggcgttctgctttgagtatgctggcgtcatcaatagtggtctgtcgtacaactgtagcttgcctctggcatttgatggtagttgctccggcctgcaacatttctcagcgatgttacgcgacgaaattggcggcaaagctgtgaatctcctcccatctgcggaataccaggatatttatcgtatcgtcagcgacaaagttaacgagatgctgaaacaagatctgattaacggtacctctaccaccgtggaaacggtgactgataagaagacaggcgaaattacccaacgcacgaaatacgggaccaaagttatggcacagtggtggttagaacacggtgtgaatcgtggcgtcacgaaacgctcggttatgactttggtgtatgggagcaaagagtttggattccgcgatcaagtgctgagtgacaccattcaaccggcgatcgataacggcaaaggtgacatgtttctgaatccgaatcaggctgctggttacatggcgaaactgatctggaacgcagtgtccgggaccgtagtcgcagcagttgaggcgatgaactggctgaaaagtgcggcgaaattacttgctgctgaagtgaaggatcctaagacggatacagttctgcgtggccgctgcgcagtacattgggtgactcccgacggcttccctgtgtggcaggaatacaagaagcctattcagacgcgcttgaacctgatgttcctcggtcagttccgcttacagcctaccattaacaccaacaaagatagcgagattgatgcacacaaacaggagtctggtatcgctcctaactttgtacacagccaagacggtaaccaccttcgtatgactgtagtgtgggcacacgagaagtacggaatcgaatcttttgcactgattcacgactccttcggtaccattccggctgacgctgcgaacctgttcaaagcagtgcgcgaaactttcgttgacacatatgagtcttgtgatgtactggctgatttctacgaccagttcgctgaccagttgcacgagtctcaacgcgacaaaatgccagcacttccggctaaaggtaacttgaacctccgtgacatcttaaaatcggacttcgcgttcgcg

SEQ ID NO: 1312 - protein, 890 aa, synthetic construct
  REGION 1..890: note = Variant of RNA polymerase
MHHHHHHMNTINIAKNDFSDIELAAIPFNTLADHYGERLAREQLALEHESYEMGEARFRKMFERQLKAGEVADNAAAKPLITTLLPKMIARINDWFEEVKAKRGKRPTAFQFLQEIKPEAVAYITIKTTLACLTSADNTTVQAVASAIGRAIEDEARFGRIRDLEAKHFKKNVEEQLNKRVGHVYKKAFMQVVEHDMLSKGLLGGEAWSSWHKEDSIHVGVRCIEMLIESTGMVSLHRQNAGVVGQDSETIELAPEYAEAIATRAGALAGISPMFQPCVVPPKPWTGITGGGYWAAGRKPLQLVRTRSLAALRRYEEVSMPEVIKAVNIAQNTAWRINKKVLDVANTITQWQHCPVADVPAMDRGEMPARPLDIDTNEIALKAWKKEASAFYRKDKARVSRRLSMEFMLSQANKFANYEAIWFPQNMDWRGRVYAVPMFNPQGNDMTKGLLTFAQEKPIGEDGFYWLKIHGANTAGVDKVPFPQRIKFVEDNHTNIMECAKSPLENTWWAEQDSPFCFLAFCFEYAGVINSGLSYNCSLPLAFDGSCSGLQHFSAMLRDEIGGKAVNLLPSAEYQDIYRIVSDKVNEMLKQDLINGTSTTVETVTDKKTGEITQRTKYGTKVMAQWWLEHGVNRGVTKRSVMTLVYGSKEFGFRDQVLSDTIQPAIDNGKGDMFLNPNQAAGYMAKLIWNAVSGTVVAAVEAMNWLKSAAKLLAAEVKDPKTDTVLRGRCAVHWVTPDGFPVWQEYKKPIQTRLNLMFLGQFRLQPTINTNKDSEIDAHKQESGIAPNFVHSQDGNHLRMTVVWAHEKYGIESFALIHDSFGTIPADAANLFKAVRETFVDTYESCDVLADFYDQFADQLHESQRDKMPALPAKGNLNLRDILKSDFAFA

SEQ ID NO: 1313 - DNA, 2670 bp, synthetic construct
  misc_feature 1..2670: note = Variant of RNA polymerase
  source 1..2670: mol_type = other DNA
atgcaccatcaccatcaccatatgaacacgattaacattgctaagaacgacttctctgacatcgaactggctgctatcccgttcaacactctggctgaccattacggtgagcgtttagctcgcgaacagttggcccttgagcatgagtcttacgagatgggtgaagcacgcttccgcaagatgtttgagcgtcaacttaaagctggtgaggttgcggataacgctgccgccaagcctctcatcactaccctactccctaagatgattgcacgcatcaacgactggtttgaggaagtgaaagctaagcgcggcaagcgcccgacagccttccagttcctgcaagaaatcaagccggaagccgtagcgtacatcaccattaagaccactctggcttgcctaaccagtgcggacaatacaaccgttcaggctgtagcaagcgcaatcggtcgggccattgaggacgaggctcgcttcggtcgtatccgtgaccttgaagctaagcacttcaagaagaacgttgaggaacaactcaacaagcgcgtagggcacgtctacaagaaagcatttatgcaagttgtcgagcacgacatgctctctaagggtctactcggtggcgaggcgtggtcttcgtggcataaggaagactctattcatgtaggagtacgctgcatcgagatgctcattgagtcaaccggaatggttagcttacaccgccaaaatgctggcgtagtaggtcaagactctgagactatcgaactcgcacctgaatacgctgaggctatcgcaacccgtgcaggtgcgctggctggcatctctccgatgttccaaccttgcgtagttcctcctaagccgtggactggcattactggtggtggctattgggctgcggggcgcaaacccctgcagttagtacgtactcgcagtctggcggcgcttcgccgctatgaagaagtgtcgatgccggaggtcatcaaagcagtcaacattgcgcagaatacagcatggcgtattaacaagaaagttctcgacgtagcgaataccatcacccaatggcagcactgtccagtcgcggatgtgcctgcgatggatcgtggcgaaatgccagctcgtccgttggacatcgataccaacgagattgcacttaaagcgtggaagaaagaagcttccgcgttctaccgcaaagacaaagcacgcgttagccgtcgtctgtcaatggagtttatgttatctcaggcgaacaagtttgcgaattatgaggcaatctggtttccgcaaaacatggattggcgtgggcgcgtgtacgctgtcccgatgttcaatcctcagggcaacgatatgacgaaaggcctgctgacctttgcgcaggagaaacccattggtgaagacggcttctattggctcaagattcatggcgcaaatacagctggagtggataaagtaccgtttccacaacgcatcaaatttgttgaggataaccatacgaatattatggaatgcgcgaaagcaccgctggaaaacacttggtgggcggaacaggactcgccgttctgttttctggcgttctgctttgagtatgctggcgtcatcaatagtggtctgtcgtacaactgtagcttgcctctggcatttgatggtagttgctccggcctgcaacatttctcagcgatgttacgcgacgaaattggcggcaaagctgtgaatctcctcccatctgcggaataccaggatatttatcgtatcgtcagcgacaaagttaacgagatgctgaaacaagatctgattaacggtacctctaccaccgtggaaacggtgactgataagaagacaggcgaaattacccaacgcacgaaatacgggaccaaagttatggcacagtggtggttagcgcacggtgtgaatcgtggcgtcacgaaacgctcggttatgactttggtgtatgggagcaaagagtttggattccgcgatcaagtgctgagtgacaccattcaaccggcgatcgataacggcaaaggtgacatgtttctgaatccgaatcaggctgctggttacatggcgaaactgatctggaacgcagtgtccgggaccgtagtcgcagcagttgaggcgatgaactggctgaaaagtgcggcgaaattacttgctgctgaagtgaaggatcctaagacggatacagttctgcgtggccgctgcgcagtacattgggtgactcccgacggcttccctgtgtggcaggaatacaagaagcctattcagacgcgcttgaacctgatgttcctcggtcagttccgcttacagcctaccattaacaccaacaaagatagcgagattgatgcacacaaacaggagtctggtatcgctcctaactttgtacacagccaagacggtaaccaccttcgtatgactgtagtgtgggcacacgagaagtacggaatcgaatcttttgcactgattcacgactccttcggtaccattccggctgacgctgcgaacctgttcaaagcagtgcgcgaaactttcgttgacacatatgagtcttgtgatgtactggctgatttctacgaccagttcgctgaccagttgcacgagtctcaacgcgacaaaatgccagcacttccggctaaaggtaacttgaacctccgtgacatcttaaaatcggacttcgcgttcgcg

SEQ ID NO: 1314 - protein, 890 aa, synthetic construct
  REGION 1..890: note = Variant of RNA polymerase
MHHHHHHMNTINIAKNDFSDIELAAIPFNTLADHYGERLAREQLALEHESYEMGEARFRKMFERQLKAGEVADNAAAKPLITTLLPKMIARINDWFEEVKAKRGKRPTAFQFLQEIKPEAVAYITIKTTLACLTSADNTTVQAVASAIGRAIEDEARFGRIRDLEAKHFKKNVEEQLNKRVGHVYKKAFMQVVEHDMLSKGLLGGEAWSSWHKEDSIHVGVRCIEMLIESTGMVSLHRQNAGVVGQDSETIELAPEYAEAIATRAGALAGISPMFQPCVVPPKPWTGITGGGYWAAGRKPLQLVRTRSLAALRRYEEVSMPEVIKAVNIAQNTAWRINKKVLDVANTITQWQHCPVADVPAMDRGEMPARPLDIDTNEIALKAWKKEASAFYRKDKARVSRRLSMEFMLSQANKFANYEAIWFPQNMDWRGRVYAVPMFNPQGNDMTKGLLTFAQEKPIGEDGFYWLKIHGANTAGVDKVPFPQRIKFVEDNHTNIMECAKAPLENTWWAEQDSPFCFLAFCFEYAGVINSGLSYNCSLPLAFDGSCSGLQHFSAMLRDEIGGKAVNLLPSAEYQDIYRIVSDKVNEMLKQDLINGTSTTVETVTDKKTGEITQRTKYGTKVMAQWWLAHGVNRGVTKRSVMTLVYGSKEFGFRDQVLSDTIQPAIDNGKGDMFLNPNQAAGYMAKLIWNAVSGTVVAAVEAMNWLKSAAKLLAAEVKDPKTDTVLRGRCAVHWVTPDGFPVWQEYKKPIQTRLNLMFLGQFRLQPTINTNKDSEIDAHKQESGIAPNFVHSQDGNHLRMTVVWAHEKYGIESFALIHDSFGTIPADAANLFKAVRETFVDTYESCDVLADFYDQFADQLHESQRDKMPALPAKGNLNLRDILKSDFAFA

SEQ ID NO: 1315 - DNA, 2670 bp, synthetic construct
  misc_feature 1..2670: note = Variant of RNA polymerase
  source 1..2670: mol_type = other DNA
atgcaccatcaccatcaccatatgaacacgattaacattgctaagaacgacttctctgacatcgaactggctgctatcccgttcaacactctggctgaccattacggtgagcgtttagctcgcgaacagttggcccttgagcatgagtcttacgagatgggtgaagcacgcttccgcaagatgtttgagcgtcaacttaaagctggtgaggttgcggataacgctgccgccaagcctctcatcactaccctactccctaagatgattgcacgcatcaacgactggtttgaggaagtgaaagctaagcgcggcaagcgcccgacagccttccagttcctgcaagaaatcaagccggaagccgtagcgtacatcaccattaagaccactctggcttgcctaaccagtgcggacaatacaaccgttcaggctgtagcaagcgcaatcggtcgggccattgaggacgaggctcgcttcggtcgtatccgtgaccttgaagctaagcacttcaagaagaacgttgaggaacaactcaacaagcgcgtagggcacgtctacaagaaagcatttatgcaagttgtcgagcacgacatgctctctaagggtctactcggtggcgaggcgtggtcttcgtggcataaggaagactctattcatgtaggagtacgctgcatcgagatgctcattgagtcaaccggaatggttagcttacaccgccaaaatgctggcgtagtaggtcaagactctgagactatcgaactcgcacctgaatacgctgaggctatcgcaacccgtgcaggtgcgctggctggcatctctccgatgttccaaccttgcgtagttcctcctaagccgtggactggcattactggtggtggctattgggctgcggggcgcaaacccctgcagttagtacgtactcgcagtctggcggcgcttcgccgctatgaagaagtgtcgatgccggaggtcatcaaagcagtcaacattgcgcagaatacagcatggcgtattaacaagaaagttctcgacgtagcgaataccatcacccaatggcagcactgtccagtcgcggatgtgcctgcgatggatcgtggcgaaatgccagctcgtccgttggacatcgataccaacgagattgcacttaaagcgtggaagaaagaagcttccgcgttctaccgcaaagacaaagcacgcgttagccgtcgtctgtcaatggagtttatgttatctcaggcgaacaagtttgcgaattatgaggcaatctggtttccgcaaaacatggattggcgtgggcgcgtgtacgctgtcccgatgttcaatcctcagggcaacgatatgacgaaaggcctgctgacctttgcgcaggagaaacccattggtgaagacggcttctattggctcaagattcatggcgcaaatacagctggagtggataaagtaccgtttccacaacgcatcaaatttgttgaggataaccatacgaatattatggaaagcgcgaaagcaccgctggaaaacacttggtgggcggaacaggactcgccgttctgttttctggcgttctgctttgagtatgctggcgtcatcaatagtggtctgtcgtacaactgtagcttgcctctggcatttgatggtagttgctccggcctgcaacatttctcagcgatgttacgcgacgaaattggcggcaaagctgtgaatctcctcccatctgcggaataccaggatatttatcgtatcgtcagcgacaaagttaacgagatgctgaaacaagatctgattaacggtacctctaccaccgtggaaacggtgactgataagaagacaggcgaaattacccaacgcacgaaatacgggaccaaagttatggcacagtggtggttagaacacggtgtgaatcgtggcgtcacgaaacgctcggttatgactttggtgtatgggagcaaagagtttggattccgcgatcaagtgctgagtgacaccattcaaccggcgatcgataacggcaaaggtgacatgtttctgaatccgaatcaggctgctggttacatggcgaaactgatctggaacgcagtgtccgggaccgtagtcgcagcagttgaggcgatgaactggctgaaaagtgcggcgaaattacttgctgctgaagtgaaggatcctaagacggatacagttctgcgtggccgctgcgcagtacattgggtgactcccgacggcttccctgtgtggcaggaatacaagaagcctattcagacgcgcttgaacctgatgttcctcggtcagttccgcttacagcctaccattaacaccaacaaagatagcgagattgatgcacacaaacaggagtctggtatcgctcctaactttgtacacagccaagacggtaaccaccttcgtatgactgtagtgtgggcacacgagaagtacggaatcgaatcttttgcactgattcacgactccttcggtaccattccggctgacgctgcgaacctgttcaaagcagtgcgcgaaactttcgttgacacatatgagtcttgtgatgtactggctgatttctacgaccagttcgctgaccagttgcacgagtctcaacgcgacaaaatgccagcacttccggctaaaggtaacttgaacctccgtgacatcttaaaatcggacttcgcgttcgcg

SEQ ID NO: 1316 - protein, 890 aa, synthetic construct
  REGION 1..890: note = Variant of RNA polymerase
MHHHHHHMNTINIAKNDFSDIELAAIPFNTLADHYGERLAREQLALEHESYEMGEARFRKMFERQLKAGEVADNAAAKPLITTLLPKMIARINDWFEEVKAKRGKRPTAFQFLQEIKPEAVAYITIKTTLACLTSADNTTVQAVASAIGRAIEDEARFGRIRDLEAKHFKKNVEEQLNKRVGHVYKKAFMQVVEHDMLSKGLLGGEAWSSWHKEDSIHVGVRCIEMLIESTGMVSLHRQNAGVVGQDSETIELAPEYAEAIATRAGALAGISPMFQPCVVPPKPWTGITGGGYWAAGRKPLQLVRTRSLAALRRYEEVSMPEVIKAVNIAQNTAWRINKKVLDVANTITQWQHCPVADVPAMDRGEMPARPLDIDTNEIALKAWKKEASAFYRKDKARVSRRLSMEFMLSQANKFANYEAIWFPQNMDWRGRVYAVPMFNPQGNDMTKGLLTFAQEKPIGEDGFYWLKIHGANTAGVDKVPFPQRIKFVEDNHTNIMESAKAPLENTWWAEQDSPFCFLAFCFEYAGVINSGLSYNCSLPLAFDGSCSGLQHFSAMLRDEIGGKAVNLLPSAEYQDIYRIVSDKVNEMLKQDLINGTSTTVETVTDKKTGEITQRTKYGTKVMAQWWLEHGVNRGVTKRSVMTLVYGSKEFGFRDQVLSDTIQPAIDNGKGDMFLNPNQAAGYMAKLIWNAVSGTVVAAVEAMNWLKSAAKLLAAEVKDPKTDTVLRGRCAVHWVTPDGFPVWQEYKKPIQTRLNLMFLGQFRLQPTINTNKDSEIDAHKQESGIAPNFVHSQDGNHLRMTVVWAHEKYGIESFALIHDSFGTIPADAANLFKAVRETFVDTYESCDVLADFYDQFADQLHESQRDKMPALPAKGNLNLRDILKSDFAFA

SEQ ID NO: 1317 - DNA, 2670 bp, synthetic construct
  misc_feature 1..2670: note = Variant of RNA polymerase
  source 1..2670: mol_type = other DNA
atgcaccatcaccatcaccatatgaacacgattaacattgctaagaacgacttctctgacatcgaactggctgctatcccgttcaacactctggctgaccattacggtgagcgtttagctcgcgaacagttggcccttgagcatgagtcttacgagatgggtgaagcacgcttccgcaagatgtttgagcgtcaacttaaagctggtgaggttgcggataacgctgccgccaagcctctcatcactaccctactccctaagatgattgcacgcatcaacgactggtttgaggaagtgaaagctaagcgcggcaagcgcccgacagccttccagttcctgcaagaaatcaagccggaagccgtagcgtacatcaccattaagaccactctggcttgcctaaccagtgcggacaatacaaccgttcaggctgtagcaagcgcaatcggtcgggccattgaggacgaggctcgcttcggtcgtatccgtgaccttgaagctaagcacttcaagaagaacgttgaggaacaactcaacaagcgcgtagggcacgtctacaagaaagcatttatgcaagttgtcgagcacgacatgctctctaagggtctactcggtggcgaggcgtggtcttcgtggcataaggaagactctattcatgtaggagtacgctgcatcgagatgctcattgagtcaaccggaatggttagcttacaccgccaaaatgctggcgtagtaggtcaagactctgagactatcgaactcgcacctgaatacgctgaggctatcgcaacccgtgcaggtgcgctggctggcatctctccgatgttccaaccttgcgtagttcctcctaagccgtggactggcattactggtggtggctattgggctgcggggcgcaaacccctgcagttagtacgtactcgcagtctggcggcgcttcgccgctatgaagaagtgtcgatgccggaggtcatcaaagcagtcaacattgcgcagaatacagcatggcgtattaacaagaaagttctcgacgtagcgaataccatcacccaatggcagcactgtccagtcgcggatgtgcctgcgatggatcgtggcgaaatgccagctcgtccgttggacatcgataccaacgagattgcacttaaagcgtggaagaaagaagcttccgcgttctaccgcaaagacaaagcacgcgttagccgtcgtctgtcaatggagtttatgttatctcaggcgaacaagtttgcgaattatgaggcaatctggtttccgcaaaacatggattggcgtgggcgcgtgtacgctgtcccgatgttcaatcctcagggcaacgatatgacgaaaggcctgctgacctttgcgcaggagaaacccattggtgaagacggcttctattggctcaagattcatggcgcaaatacagctggagtggataaagtaccgtttccacaacgcatcaaatttgttgaggataaccatacgaatattatggaatgcgcgaaagcaccgctggaaaacacttggtgggcggaacaggactcgccgttctgttttctggcgttctgctttgagtatgctggcgtcatcaatagtggtctgtcgtacaactgtagcttgcctctggcatttgatggtagttgctccggcctgcaacatttctcagcgatgttacgcgacgaaattggcggcaaagctgtgaatctcctcccatctgcggaataccaggatatttatcgtatcgtcgccgacaaagttaacgagatgctgaaacaagatctgattaacggtacctctaccaccgtggaaacggtgactgataagaagacaggcgaaattacccaacgcacgaaatacgggaccaaagttatggcacagtggtggttagaacacggtgtgaatcgtggcgtcacgaaacgctcggttatgactttggtgtatgggagcaaagagtttggattccgcgatcaagtgctgagtgacaccattcaaccggcgatcgataacggcaaaggtgacatgtttctgaatccgaatcaggctgctggttacatggcgaaactgatctggaacgcagtgtccgggaccgtagtcgcagcagttgaggcgatgaactggctgaaaagtgcggcgaaattacttgctgctgaagtgaaggatcctaagacggatacagttctgcgtggccgctgcgcagtacattgggtgactcccgacggcttccctgtgtggcaggaatacaagaagcctattcagacgcgcttgaacctgatgttcctcggtcagttccgcttacagcctaccattaacaccaacaaagatagcgagattgatgcacacaaacaggagtctggtatcgctcctaactttgtacacagccaagacggtaaccaccttcgtatgactgtagtgtgggcacacgagaagtacggaatcgaatcttttgcactgattcacgactccttcggtaccattccggctgacgctgcgaacctgttcaaagcagtgcgcgaaactttcgttgacacatatgagtcttgtgatgtactggctgatttctacgaccagttcgctgaccagttgcacgagtctcaacgcgacaaaatgccagcacttccggctaaaggtaacttgaacctccgtgacatcttaaaatcggacttcgcgttcgcg

SEQ ID NO: 1318 - protein, 890 aa, synthetic construct
  REGION 1..890: note = Variant of RNA polymerase
MHHHHHHMNTINIAKNDFSDIELAAIPFNTLADHYGERLAREQLALEHESYEMGEARFRKMFERQLKAGEVADNAAAKPLITTLLPKMIARINDWFEEVKAKRGKRPTAFQFLQEIKPEAVAYITIKTTLACLTSADNTTVQAVASAIGRAIEDEARFGRIRDLEAKHFKKNVEEQLNKRVGHVYKKAFMQVVEHDMLSKGLLGGEAWSSWHKEDSIHVGVRCIEMLIESTGMVSLHRQNAGVVGQDSETIELAPEYAEAIATRAGALAGISPMFQPCVVPPKPWTGITGGGYWAAGRKPLQLVRTRSLAALRRYEEVSMPEVIKAVNIAQNTAWRINKKVLDVANTITQWQHCPVADVPAMDRGEMPARPLDIDTNEIALKAWKKEASAFYRKDKARVSRRLSMEFMLSQANKFANYEAIWFPQNMDWRGRVYAVPMFNPQGNDMTKGLLTFAQEKPIGEDGFYWLKIHGANTAGVDKVPFPQRIKFVEDNHTNIMECAKAPLENTWWAEQDSPFCFLAFCFEYAGVINSGLSYNCSLPLAFDGSCSGLQHFSAMLRDEIGGKAVNLLPSAEYQDIYRIVADKVNEMLKQDLINGTSTTVETVTDKKTGEITQRTKYGTKVMAQWWLEHGVNRGVTKRSVMTLVYGSKEFGFRDQVLSDTIQPAIDNGKGDMFLNPNQAAGYMAKLIWNAVSGTVVAAVEAMNWLKSAAKLLAAEVKDPKTDTVLRGRCAVHWVTPDGFPVWQEYKKPIQTRLNLMFLGQFRLQPTINTNKDSEIDAHKQESGIAPNFVHSQDGNHLRMTVVWAHEKYGIESFALIHDSFGTIPADAANLFKAVRETFVDTYESCDVLADFYDQFADQLHESQRDKMPALPAKGNLNLRDILKSDFAFA

SEQ ID NO: 1319 - DNA, 2670 bp, synthetic construct
  misc_feature 1..2670: note = Variant of RNA polymerase
  source 1..2670: mol_type = other DNA
atgcaccatcaccatcaccatatgaacacgattaacattgctaagaacgacttctctgacatcgaactggctgctatcccgttcaacactctggctgaccattacggtgagcgtttagctcgcgaacagttggcccttgagcatgagtcttacgagatgggtgaagcacgcttccgcaagatgtttgagcgtcaacttaaagctggtgaggttgcggataacgctgccgccaagcctctcatcactaccctactccctaagatgattgcacgcatcaacgactggtttgaggaagtgaaagctaagcgcggcaagcgcccgacagccttccagttcctgcaagaaatcaagccggaagccgtagcgtacatcaccattaagaccactctggcttgcctaaccagtgcggacaatacaaccgttcaggctgtagcaagcgcaatcggtcgggccattgaggacgaggctcgcttcggtcgtatccgtgaccttgaagctaagcacttcaagaagaacgttgaggaacaactcaacaagcgcgtagggcacgtctacaagaaagcatttatgcaagttgtcgagcacgacatgctctctaagggtctactcggtggcgaggcgtggtcttcgtggcataaggaagactctattcatgtaggagtacgctgcatcgagatgctcattgagtcaaccggaatggttagcttacaccgccaaaatgctggcgtagtgggtgcagactctgagactatcgaactcgcacctgaatacgctgaggctatcgcaacccgtgcaggtgcgctggctggcatctctccgatgttccaaccttgcgtagttcctcctaagccgtggactggcattactggtggtggctattgggctgcggggcgcaaacccctgcagttagtacgtactcgcagtctggcggcgcttcgccgctatgaagaagtgtcgatgccggaggtcatcaaagcagtcaacattgcgcagaatacagcatggcgtattaacaagaaagttctcgacgtagcgaataccatcacccaatggcagcactgtccagtcgcggatgtgcctgcgatggatcgtggcgaaatgccagctcgtccgttggacatcgataccaacgagattgcacttaaagcgtggaagaaagaagcttccgcgttctaccgcaaagacaaagcacgcgtgagccgtcgtctgtcgatggagtttatgttatctcaggcgaacaagtttgcgaattatgaggcaatctggtttccgcaaaacatggattggcgtgggcgcgtgtacgctgtcccgatgttcaatcctcagggcaacgatatgacgaaaggcctgctgacctttgcgcaggagaaacccattggtgaagacggcttctattggctcaagattcatggcgcaaatacagctggagtggataaagtaccgtttccacaacgcatcaaatttgttgaggataaccatacgaatattatggaatgcgcgaaagcaccgctggaaaacacttggtgggcggaacaggactcgccgttctgttttctggcgttctgctttgagtatgctggcgtcatcaatagtggtctgtcgtacaactgtagcttgcctctggcatttgatggtagttgctccggcctgcaacatttctcagcgatgttacgcgacgaaattggcggcaaagctgtgaatctcctcccatctgcggaataccaggatatttatcgtatcgtcagcgacaaagttaacgagatgctgaaacaagatctgattaacggtacctctaccaccgtggaaacggtgactgataagaagacaggcgaaattacccaacgcacgaaatacgggaccaaagttatggcacagtggtggttagaacacggtgtgaatcgtggcgtcacgaaacgctcggttatgactttggtgtatgggagcaaagagtttggattccgcgatcaagtgctgagtgacaccattcaaccggcgatcgataacggcaaaggtgacatgtttctgaatccgaatcaggctgctggttacatggcgaaactgatctggaacgcagtgtccgggaccgtagtcgcagcagttgaggcgatgaactggctgaaaagtgcggcgaaattacttgctgctgaagtgaaggatcctaagacggatacagttctgcgtggccgctgcgcagtacattgggtgactcccgacggcttccctgtgtggcaggaatacaagaagcctattcagacgcgcttgaacctgatgttcctcggtcagttccgcttacagcctaccattaacaccaacaaagatagcgagattgatgcacacaaacaggagtctggtatcgctcctaactttgtacacagccaagacggtaaccaccttcgtatgactgtagtgtgggcacacgagaagtacggaatcgaatcttttgcactgattcacgactccttcggtaccattccggctgacgctgcgaacctgttcaaagcagtgcgcgaaactttcgttgacacatatgagtcttgtgatgtactggctgatttctacgaccagttcgctgaccagttgcacgagtctcaacgcgacaaaatgccagcacttccggctaaaggtaacttgaacctccgtgacatcttaaaatcggacttcgcgttcgcg

SEQ ID NO: 1320 - protein, 890 aa, synthetic construct
  REGION 1..890: note = Variant of RNA polymerase
MHHHHHHMNTINIAKNDFSDIELAAIPFNTLADHYGERLAREQLALEHESYEMGEARFRKMFERQLKAGEVADNAAAKPLITTLLPKMIARINDWFEEVKAKRGKRPTAFQFLQEIKPEAVAYITIKTTLACLTSADNTTVQAVASAIGRAIEDEARFGRIRDLEAKHFKKNVEEQLNKRVGHVYKKAFMQVVEHDMLSKGLLGGEAWSSWHKEDSIHVGVRCIEMLIESTGMVSLHRQNAGVVGADSETIELAPEYAEAIATRAGALAGISPMFQPCVVPPKPWTGITGGGYWAAGRKPLQLVRTRSLAALRRYEEVSMPEVIKAVNIAQNTAWRINKKVLDVANTITQWQHCPVADVPAMDRGEMPARPLDIDTNEIALKAWKKEASAFYRKDKARVSRRLSMEFMLSQANKFANYEAIWFPQNMDWRGRVYAVPMFNPQGNDMTKGLLTFAQEKPIGEDGFYWLKIHGANTAGVDKVPFPQRIKFVEDNHTNIMECAKAPLENTWWAEQDSPFCFLAFCFEYAGVINSGLSYNCSLPLAFDGSCSGLQHFSAMLRDEIGGKAVNLLPSAEYQDIYRIVSDKVNEMLKQDLINGTSTTVETVTDKKTGEITQRTKYGTKVMAQWWLEHGVNRGVTKRSVMTLVYGSKEFGFRDQVLSDTIQPAIDNGKGDMFLNPNQAAGYMAKLIWNAVSGTVVAAVEAMNWLKSAAKLLAAEVKDPKTDTVLRGRCAVHWVTPDGFPVWQEYKKPIQTRLNLMFLGQFRLQPTINTNKDSEIDAHKQESGIAPNFVHSQDGNHLRMTVVWAHEKYGIESFALIHDSFGTIPADAANLFKAVRETFVDTYESCDVLADFYDQFADQLHESQRDKMPALPAKGNLNLRDILKSDFAFA

SEQ ID NO: 1321 - DNA, 2670 bp, synthetic construct
  misc_feature 1..2670: note = Variant of RNA polymerase
  source 1..2670: mol_type = other DNA
atgcaccatcaccatcaccatatgaacacgattaacattgctaagaacgacttctctgacatcgaactggctgctatcccgttcaacactctggctgaccattacggtgagcgtttagctcgcgaacagttggcccttgagcatgagtcttacgagatgggtgaagcacgcttccgcaagatgtttgagcgtcaacttaaagctggtgaggttgcggataacgctgccgccaagcctctcatcactaccctactccctaagatgattgcacgcatcaacgactggtttgaggaagtgaaagctaagcgcggcaagcgcccgacagccttccagttcctgcaagaaatcaagccggaagccgtagcgtacatcaccattaagaccactctggcttgcctaaccagtgcggacaatacaaccgttcaggctgtagcaagcgcaatcggtcgggccattgaggacgaggctcgcttcggtcgtatccgtgaccttgaagctaagcacttcaagaagaacgttgaggaacaactcaacaagcgcgtagggcacgtctacaagaaagcatttatgcaagttgtcgagcacgacatgctctctaagggtctactcggtggcgaggcgtggtcttcgtggcataaggaagactctattcatgtaggagtacgctgcatcgagatgctcattgagtcaaccggaatggttagcttacaccgccaaaatgctggcgtagtaggtcaagactctgagactatcgaactcgcacctgaatacgctgaggctatcgcaacccgtgcaggtgcgctggctggcatctctccgatgttccaaccttgcgtagttcctcctaagccgtggactggcattactggtggtggctattgggctgcggggcgcaaacccctgcagttagtacgtactcgcagtctggcggcgcttcgccgctatgaagaagtgtcgatgccggaggtcatcaaagcagtcaacattgcgcagaatacagcatggcgtattaacaagaaagttctcgacgtagcgaataccatcacccaatggcagcactgtccagtcgcggatgtgcctgcgatggatcgtggcgaaatgccagctcgtccgttggacatcgataccaacgagattgcacttaaagcgtggaagaaagaagcttccgcgttctaccgcaaagacaaagcacgcgttagccgtcgtctgtcaatggagtttatgttatctcaggcgaacaagtttgcgaatcacgaggcaatctggtttccgcaaaacatggattggcgtgggcgcgtgtacgctgtcccgatgttcaatcctcagggcaacgatatgacgaaaggcctgctgacctttgcgcaggagaaacccattggtgaagacggcttctattggctcaagattcatggcgcaaatacagctggagtggataaagtaccgtttccacaacgcatcaaatttgttgaggataaccatacgaatattatggaatgcgcgaaagcaccgctggaaaacacttggtgggcggaacaggactcgccgttctgttttctggcgttctgctttgagtatgctggcgtcatcaatagtggtctgtcgtacaactgtagcttgcctctggcatttgatggtagttgctccggcctgcaacatttctcagcgatgttacgcgacgaaattggcggcaaagctgtgaatctcctcccatctgcggaataccaggatatttatcgtatcgtcagcgacaaagttaacgagatgctgaaacaagatctgattaacggtacctctaccaccgtggaaacggtgactgataagaagacaggcgaaattacccaacgcacgaaatacgggaccaaagttatggcacagtggtggttagaacacggtgtgaatcgtggcgtcacgaaacgctcggttatgactttggtgtatgggagcaaagagtttggattccgcgatcaagtgctgagtgacaccattcaaccggcgatcgataacggcaaaggtgacatgtttctgaatccgaatcaggctgctggttacatggcgaaactgatctggaacgcagtgtccgggaccgtagtcgcagcagttgaggcgatgaactggctgaaaagtgcggcgaaattacttgctgctgaagtgaaggatcctaagacggatacagttctgcgtggccgctgcgcagtacattgggtgactcccgacggcttccctgtgtggcaggaatacaagaagcctattcagacgcgcttgaacctgatgttcctcggtcagttccgcttacagcctaccattaacaccaacaaagatagcgagattgatgcacacaaacaggagtctggtatcgctcctaactttgtacacagccaagacggtaaccaccttcgtatgactgtagtgtgggcacacgagaagtacggaatcgaatcttttgcactgattcacgactccttcggtaccattccggctgacgctgcgaacctgttcaaagcagtgcgcgaaactttcgttgacacatatgagtcttgtgatgtactggctgatttctacgaccagttcgctgaccagttgcacgagtctcaacgcgacaaaatgccagcacttccggctaaaggtaacttgaacctccgtgacatcttaaaatcggacttcgcgttcgcg

SEQ ID NO: 1322 - protein, 890 aa, synthetic construct
  REGION 1..890: note = Variant of RNA polymerase
MHHHHHHMNTINIAKNDFSDIELAAIPFNTLADHYGERLAREQLALEHESYEMGEARFRKMFERQLKAGEVADNAAAKPLITTLLPKMIARINDWFEEVKAKRGKRPTAFQFLQEIKPEAVAYITIKTTLACLTSADNTTVQAVASAIGRAIEDEARFGRIRDLEAKHFKKNVEEQLNKRVGHVYKKAFMQVVEHDMLSKGLLGGEAWSSWHKEDSIHVGVRCIEMLIESTGMVSLHRQNAGVVGQDSETIELAPEYAEAIATRAGALAGISPMFQPCVVPPKPWTGITGGGYWAAGRKPLQLVRTRSLAALRRYEEVSMPEVIKAVNIAQNTAWRINKKVLDVANTITQWQHCPVADVPAMDRGEMPARPLDIDTNEIALKAWKKEASAFYRKDKARVSRRLSMEFMLSQANKFANHEAIWFPQNMDWRGRVYAVPMFNPQGNDMTKGLLTFAQEKPIGEDGFYWLKIHGANTAGVDKVPFPQRIKFVEDNHTNIMECAKAPLENTWWAEQDSPFCFLAFCFEYAGVINSGLSYNCSLPLAFDGSCSGLQHFSAMLRDEIGGKAVNLLPSAEYQDIYRIVSDKVNEMLKQDLINGTSTTVETVTDKKTGEITQRTKYGTKVMAQWWLEHGVNRGVTKRSVMTLVYGSKEFGFRDQVLSDTIQPAIDNGKGDMFLNPNQAAGYMAKLIWNAVSGTVVAAVEAMNWLKSAAKLLAAEVKDPKTDTVLRGRCAVHWVTPDGFPVWQEYKKPIQTRLNLMFLGQFRLQPTINTNKDSEIDAHKQESGIAPNFVHSQDGNHLRMTVVWAHEKYGIESFALIHDSFGTIPADAANLFKAVRETFVDTYESCDVLADFYDQFADQLHESQRDKMPALPAKGNLNLRDILKSDFAFA

SEQ ID NO: 1323 - DNA, 2670 bp, synthetic construct
  misc_feature 1..2670: note = Variant of RNA polymerase
  source 1..2670: mol_type = other DNA
atgcaccatcaccatcaccatatgaacacgattaacattgctaagaacgacttctctgacatcgaactggctgctatcccgttcaacactctggctgaccattacggtgagcgtttagctcgcgaacagttggcccttgagcatgagtcttacgagatgggtgaagcacgcttccgcaagatgtttgagcgtcaacttaaagctggtgaggttgcggataacgctgccgccaagcctctcatcactaccctactccctaagatgattgcacgcatcaacgactggtttgaggaagtgaaagctaagcgcggcaagcgcccgacagccttccagttcctgcaagaaatcaagccggaagccgtagcgtacatcaccattaagaccactctggcttgcctaaccagtgcggacaatacaaccgttcaggctgtagcaagcgcaatcggtcgggccattgaggacgaggctcgcttcggtcgtatccgtgaccttgaagctaagcacttcaagaagaacgttgaggaacaactcaacaagcgcgtagggcacgtctacaagaaagcatttatgcaagttgtcgagcacgacatgctctctaagggtctactcggtggcgaggcgtggtcttcgtggcataaggaagactctattcatgtaggagtacgctgcatcgagatgctcattgagtcaaccggaatggttagcttacaccgccaaaatgctggcgtagtaggtcaagactctgagactatcgaactcgcacctgaatacgctgaggctatcgcaacccgtgcaggtgcgctggctggcatctctccgatgttccaaccttgcgtagttcctcctaagccgtggactggcattactggtggtggctattgggctgcggggcgcaaacccctgcagttagtacgtactcgcagtctggcggcgcttcgccgctatgaagaagtgtcgatgccggaggtcatcaaagcagtcaacattgcgcagaatacagcatggcgtattaacaagaaagttctcgacgtagcgaataccatcacccaatggcagcactgtccagtcgcggatgtgcctgcgatggatcgtggcgaaatgccagctcgtccgttggacatcgataccaacgagattgcacttaaagcgtggaagaaagaagcttccgcgttctaccgcaaagacaaagcacgcgttagccgtcgtctgtcaatggagtttatgttatctcaggcgaacaagtttgcgaattatgaggcaatctggtttccgcaaaacatggattggcgtgggcgcgtgtacgctgtcccgatgttcaatcctcagggcaacgatatgacgaaaggcctgctgacctttgcgcaggagaaacccattggtgaagacggcttctattggctcaagattcatggcgcaaatacagctggagtggataaagtaccgtttccacaacgcatcaaatttattgaggataaccatacgaatattatggaatgcgcgaaagcaccgctggaaaacacttggtgggcggaacaggactcgccgttctgttttctggcgttctgctttgagtatgctggcgtcatcaatagtggtctgtcgtacaactgtagcttgcctctggcatttgatggtagttgctccggcctgcaacatttctcagcgatgttacgcgacgaaattggcggcaaagctgtgaatctcctcccatctgcggaataccaggatatttatcgtatcgtcagcgacaaagttaacgagatgctgaaacaagatctgattaacggtacctctaccaccgtggaaacggtgactgataagaagacaggcgaaattacccaacgcacgaaatacgggaccaaagttatggcacagtggtggttagaacacggtgtgaatcgtggcgtcacgaaacgctcggttatgactttggtgtatgggagcaaagagtttggattccgcgatcaagtgctgagtgacaccattcaaccggcgatcgataacggcaaaggtgacatgtttctgaatccgaatcaggctgctggttacatggcgaaactgatctggaacgcagtgtccgggaccgtagtcgcagcagttgaggcgatgaactggctgaaaagtgcggcgaaattacttgctgctgaagtgaaggatcctaagacggatacagttctgcgtggccgctgcgcagtacattgggtgactcccgacggcttccctgtgtggcaggaatacaagaagcctattcagacgcgcttgaacctgatgttcctcggtcagttccgcttacagcctaccattaacaccaacaaagatagcgagattgatgcacacaaacaggagtctggtatcgctcctaactttgtacacagccaagacggtaaccaccttcgtatgactgtagtgtgggcacacgagaagtacggaatcgaatcttttgcactgattcacgactccttcggtaccattccggctgacgctgcgaacctgttcaaagcagtgcgcgaaactttcgttgacacatatgagtcttgtgatgtactggctgatttctacgaccagttcgctgaccagttgcacgagtctcaacgcgacaaaatgccagcacttccggctaaaggtaacttgaacctccgtgacatcttaaaatcggacttcgcgttcgcg

SEQ ID NO: 1324 - protein, 890 aa, synthetic construct
  REGION 1..890: note = Variant of RNA polymerase
MHHHHHHMNTINIAKNDFSDIELAAIPFNTLADHYGERLAREQLALEHESYEMGEARFRKMFERQLKAGEVADNAAAKPLITTLLPKMIARINDWFEEVKAKRGKRPTAFQFLQEIKPEAVAYITIKTTLACLTSADNTTVQAVASAIGRAIEDEARFGRIRDLEAKHFKKNVEEQLNKRVGHVYKKAFMQVVEHDMLSKGLLGGEAWSSWHKEDSIHVGVRCIEMLIESTGMVSLHRQNAGVVGQDSETIELAPEYAEAIATRAGALAGISPMFQPCVVPPKPWTGITGGGYWAAGRKPLQLVRTRSLAALRRYEEVSMPEVIKAVNIAQNTAWRINKKVLDVANTITQWQHCPVADVPAMDRGEMPARPLDIDTNEIALKAWKKEASAFYRKDKARVSRRLSMEFMLSQANKFANYEAIWFPQNMDWRGRVYAVPMFNPQGNDMTKGLLTFAQEKPIGEDGFYWLKIHGANTAGVDKVPFPQRIKFIEDNHTNIMECAKAPLENTWWAEQDSPFCFLAFCFEYAGVINSGLSYNCSLPLAFDGSCSGLQHFSAMLRDEIGGKAVNLLPSAEYQDIYRIVSDKVNEMLKQDLINGTSTTVETVTDKKTGEITQRTKYGTKVMAQWWLEHGVNRGVTKRSVMTLVYGSKEFGFRDQVLSDTIQPAIDNGKGDMFLNPNQAAGYMAKLIWNAVSGTVVAAVEAMNWLKSAAKLLAAEVKDPKTDTVLRGRCAVHWVTPDGFPVWQEYKKPIQTRLNLMFLGQFRLQPTINTNKDSEIDAHKQESGIAPNFVHSQDGNHLRMTVVWAHEKYGIESFALIHDSFGTIPADAANLFKAVRETFVDTYESCDVLADFYDQFADQLHESQRDKMPALPAKGNLNLRDILKSDFAFA

SEQ ID NO: 1325 - DNA, 2670 bp, synthetic construct
  misc_feature 1..2670: note = Variant of RNA polymerase
  source 1..2670: mol_type = other DNA
atgcaccatcaccatcaccatatgaacacgattaacattgctaagaacgacttctctgacatcgaactggctgctatcccgttcaacactctggctgaccattacggtgagcgtttagctcgcgaacagttggcccttgagcatgagtcttacgagatgggtgaagcacgcttccgcaagatgtttgagcgtcaacttaaagctggtgaggttgcggataacgctgccgccaagcctctcatcactaccctactccctaagatgattgcacgcatcaacgactggtttgaggaagtgaaagctaagcgcggcaagcgcccgacagccttccagttcctgcaagaaatcaagccggaagccgtagcgtacatcaccattaagaccactctggcttgcctaaccagtgcggacaatacaaccgttcaggctgtagcaagcgcaatcggtcgggccattgaggacgaggctcgcttcggtcgtatccgtgaccttgaagctaagcacttcaagaagaacgttgaggaacaactcaacaagcgcgtagggcacgtctacaagaaagcatttatgcaagttgtcgagcacgacatgctctctaagggtctactcggtggcgaggcgtggtcttcgtggcataaggaagactctattcatgtaggagtacgctgcatcgagatgctcattgagtcaaccggaatggttagcttacaccgccaaaatgctggcgtagtaggtcaagactctgagactatcgaactcgcacctgaatacgctgaggctatcgcaacccgtgcaggtgcgctggctggcatctctccgatgttccaaccttgcgtagttcctcctaagccgtggactggcattactggtggtggctattgggctgcggggcgcaaacccctgcagttagtacgtactcgcagtctggcggcgcttcgccgctatgaagaagtgtcgatgccggaggtcatcaaagcagtcaacattgcgcagaatacagcatggcgtattaacaagaaagttctcgacgtagcgaataccatcacccaatggcagcactgtccagtcgcggatgtgcctgcgatggatcgtggcgaaatgccagctcgtccgttggacatcgataccaacgagattgcacttaaagcgtggaagaaagaagctgccgcgttctaccgcaaagacaaagcacgcgttagccgtcgtctgtcaatggagtttatgttatctcaggcgaacaagtttgcgaattatgaggcaatctggtttccgcaaaacatggattggcgtgggcgcgtgtacgctgtcccgatgttcaatcctcagggcaacgatatgacgaaaggcctgctgacctttgcgcaggagaaacccattggtgaagacggcttctattggctcaagattcatggcgcaaatacagctggagtggataaagtaccgtttccacaacgcatcaaatttgttgaggataaccatacgaatattatggaatgcgcgaaagcaccgctggaaaacacttggtgggcggaacaggactcgccgttctgttttctggcgttctgctttgagtatgctggcgtcatcaatagtggtctgtcgtacaactgtagcttgcctctggcatttgatggtagttgctccggcctgcaacatttctcagcgatgttacgcgacgaaattggcggcaaagctgtgaatctcctcccatctgcggaataccaggatatttatcgtatcgtcagcgacaaagttaacgagatgctgaaacaagatctgattaacggtacctctaccaccgtggaaacggtgactgataagaagacaggcgaaattacccaacgcacgaaatacgggaccaaagttatggcacagtggtggttagaacacggtgtgaatcgtggcgtcacgaaacgctcggttatgactttggtgtatgggagcaaagagtttggattccgcgatcaagtgctgagtgacaccattcaaccggcgatcgataacggcaaaggtgacatgtttctgaatccgaatcaggctgctggttacatggcgaaactgatctggaacgcagtgtccgggaccgtagtcgcagcagttgaggcgatgaactggctgaaaagtgcggcgaaattacttgctgctgaagtgaaggatcctaagacggatacagttctgcgtggccgctgcgcagtacattgggtgactcccgacggcttccctgtgtggcaggaatacaagaagcctattcagacgcgcttgaacctgatgttcctcggtcagttccgcttacagcctaccattaacaccaacaaagatagcgagattgatgcacacaaacaggagtctggtatcgctcctaactttgtacacagccaagacggtaaccaccttcgtatgactgtagtgtgggcacacgagaagtacggaatcgaatcttttgcactgattcacgactccttcggtaccattccggctgacgctgcgaacctgttcaaagcagtgcgcgaaactttcgttgacacatatgagtcttgtgatgtactggctgatttctacgaccagttcgctgaccagttgcacgagtctcaacgcgacaaaatgccagcacttccggctaaaggtaacttgaacctccgtgacatcttaaaatcggacttcgcgttcgcg

SEQ ID NO: 1326 - protein, 890 aa, synthetic construct
  REGION 1..890: note = Variant of RNA polymerase
MHHHHHHMNTINIAKNDFSDIELAAIPFNTLADHYGERLAREQLALEHESYEMGEARFRKMFERQLKAGEVADNAAAKPLITTLLPKMIARINDWFEEVKAKRGKRPTAFQFLQEIKPEAVAYITIKTTLACLTSADNTTVQAVASAIGRAIEDEARFGRIRDLEAKHFKKNVEEQLNKRVGHVYKKAFMQVVEHDMLSKGLLGGEAWSSWHKEDSIHVGVRCIEMLIESTGMVSLHRQNAGVVGQDSETIELAPEYAEAIATRAGALAGISPMFQPCVVPPKPWTGITGGGYWAAGRKPLQLVRTRSLAALRRYEEVSMPEVIKAVNIAQNTAWRINKKVLDVANTITQWQHCPVADVPAMDRGEMPARPLDIDTNEIALKAWKKEAAAFYRKDKARVSRRLSMEFMLSQANKFANYEAIWFPQNMDWRGRVYAVPMFNPQGNDMTKGLLTFAQEKPIGEDGFYWLKIHGANTAGVDKVPFPQRIKFVEDNHTNIMECAKAPLENTWWAEQDSPFCFLAFCFEYAGVINSGLSYNCSLPLAFDGSCSGLQHFSAMLRDEIGGKAVNLLPSAEYQDIYRIVSDKVNEMLKQDLINGTSTTVETVTDKKTGEITQRTKYGTKVMAQWWLEHGVNRGVTKRSVMTLVYGSKEFGFRDQVLSDTIQPAIDNGKGDMFLNPNQAAGYMAKLIWNAVSGTVVAAVEAMNWLKSAAKLLAAEVKDPKTDTVLRGRCAVHWVTPDGFPVWQEYKKPIQTRLNLMFLGQFRLQPTINTNKDSEIDAHKQESGIAPNFVHSQDGNHLRMTVVWAHEKYGIESFALIHDSFGTIPADAANLFKAVRETFVDTYESCDVLADFYDQFADQLHESQRDKMPALPAKGNLNLRDILKSDFAFA

SEQ ID NO: 1327 - DNA, 2670 bp, synthetic construct
  misc_feature 1..2670: note = Variant of RNA polymerase
  source 1..2670: mol_type = other DNA
atgcaccatcaccatcaccatatgaacacgattaacattgctaagaacgacttctctgacatcgaactggctgctatcccgttcaacactctggctgaccattacggtgagcgtttagctcgcgaacagttggcccttgagcatgagtcttacgagatgggtgaagcacgcttccgcaagatgtttgagcgtcaacttaaagctggtgaggttgcggataacgctgccgccaagcctctcatcactaccctactccctaagatgattgcacgcatcaacgactggtttgaggaagtgaaagctaagcgcggcaagcgcccgacagccttccagttcctgcaagaaatcaagccggaagccgtagcgtacatcaccattaagaccactctggcttgcctaaccagtgcggacaatacaaccgttcaggctgtagcaagcgcaatcggtcgggccattgaggacgaggctcgcttcggtcgtatccgtgaccttgaagctaagcacttcaagaagaacgttgaggaacaactcaacaagcgcgtagggcacgtctacaagaaagcatttatgcaagttgtcgagcacgacatgctctctaagggtctactcggtggcgaggcgtggtcttcgtggcataaggaagactctattcatgtaggagtacgctgcatcgagatgctcattgagtcaaccggaatggttagcttacaccgccaaaatgctggcgtagtaggtcaagactctgagactatcgaactcgcacctgaatacgctgaggctatcgcaacccgtgcaggtgcgctggctggcatctctccgatgttccaaccttgcgtagttcctcctaagccgtggactggcattactggtggtggctattgggctgcggggcgcaaacccctgcagttagtacgtactcgcagtctggcggcgcttcgccgctatgaagaagtgtcgatgccggaggtcatcaaagcagtcaacattgcgcagaatacagcatggcgtattaacaagaaagttctcgacgtagcgaataccatcacccaatggcagcactgtccagtcgcggatgtgcctgcgatggatcgtggcgaaatgccagctcgtccgttggacatcgataccaacgagattgcacttaaagcgtggaagaaagaagcttccgcgttctaccgcaaagacaaagcacgcgttagccgtcgtctgtcaatggagtttatgttatctcaggcgaacaagtttgcgaattatgaggcaatctggtttccgcaaaacatggattggcgtgggcgcgtgtacgctgtcccgatgttcaatcctcagggcaacgatatgacgaaaggcctgctgacctttgcgcaggagaaacccattggtgaagacggcttctattggctcaagattcatggcgcaaatacagctggagtggataaagtaccgtttccacaacgcatcaaatttgttgaggataaccatgagaatattatggaatgcgcgaaagcaccgctggaaaacacttggtgggcggaacaggactcgccgttctgttttctggcgttctgctttgagtatgctggcgtcatcaatagtggtctgtcgtacaactgtagcttgcctctggcatttgatggtagttgctccggcctgcaacatttctcagcgatgttacgcgacgaaattggcggcaaagctgtgaatctcctcccatctgcggaataccaggatatttatcgtatcgtcagcgacaaagttaacgagatgctgaaacaagatctgattaacggtacctctaccaccgtggaaacggtgactgataagaagacaggcgaaattacccaacgcacgaaatacgggaccaaagttatggcacagtggtggttagaacacggtgtgaatcgtggcgtcacgaaacgctcggttatgactttggtgtatgggagcaaagagtttggattccgcgatcaagtgctgagtgacaccattcaaccggcgatcgataacggcaaaggtgacatgtttctgaatccgaatcaggctgctggttacatggcgaaactgatctggaacgcagtgtccgggaccgtagtcgcagcagttgaggcgatgaactggctgaaaagtgcggcgaaattacttgctgctgaagtgaaggatcctaagacggatacagttctgcgtggccgctgcgcagtacattgggtgactcccgacggcttccctgtgtggcaggaatacaagaagcctattcagacgcgcttgaacctgatgttcctcggtcagttccgcttacagcctaccattaacaccaacaaagatagcgagattgatgcacacaaacaggagtctggtatcgctcctaactttgtacacagccaagacggtaaccaccttcgtatgactgtagtgtgggcacacgagaagtacggaatcgaatcttttgcactgattcacgactccttcggtaccattccggctgacgctgcgaacctgttcaaagcagtgcgcgaaactttcgttgacacatatgagtcttgtgatgtactggctgatttctacgaccagttcgctgaccagttgcacgagtctcaacgcgacaaaatgccagcacttccggctaaaggtaacttgaacctccgtgacatcttaaaatcggacttcgcgttcgcg

SEQ ID NO: 1328 - protein, 890 aa, synthetic construct
  REGION 1..890: note = Variant of RNA polymerase
MHHHHHHMNTINIAKNDFSDIELAAIPFNTLADHYGERLAREQLALEHESYEMGEARFRKMFERQLKAGEVADNAAAKPLITTLLPKMIARINDWFEEVKAKRGKRPTAFQFLQEIKPEAVAYITIKTTLACLTSADNTTVQAVASAIGRAIEDEARFGRIRDLEAKHFKKNVEEQLNKRVGHVYKKAFMQVVEHDMLSKGLLGGEAWSSWHKEDSIHVGVRCIEMLIESTGMVSLHRQNAGVVGQDSETIELAPEYAEAIATRAGALAGISPMFQPCVVPPKPWTGITGGGYWAAGRKPLQLVRTRSLAALRRYEEVSMPEVIKAVNIAQNTAWRINKKVLDVANTITQWQHCPVADVPAMDRGEMPARPLDIDTNEIALKAWKKEASAFYRKDKARVSRRLSMEFMLSQANKFANYEAIWFPQNMDWRGRVYAVPMFNPQGNDMTKGLLTFAQEKPIGEDGFYWLKIHGANTAGVDKVPFPQRIKFVEDNHENIMECAKAPLENTWWAEQDSPFCFLAFCFEYAGVINSGLSYNCSLPLAFDGSCSGLQHFSAMLRDEIGGKAVNLLPSAEYQDIYRIVSDKVNEMLKQDLINGTSTTVETVTDKKTGEITQRTKYGTKVMAQWWLEHGVNRGVTKRSVMTLVYGSKEFGFRDQVLSDTIQPAIDNGKGDMFLNPNQAAGYMAKLIWNAVSGTVVAAVEAMNWLKSAAKLLAAEVKDPKTDTVLRGRCAVHWVTPDGFPVWQEYKKPIQTRLNLMFLGQFRLQPTINTNKDSEIDAHKQESGIAPNFVHSQDGNHLRMTVVWAHEKYGIESFALIHDSFGTIPADAANLFKAVRETFVDTYESCDVLADFYDQFADQLHESQRDKMPALPAKGNLNLRDILKSDFAFA

SEQ ID NO: 1329 - DNA, 2670 bp, synthetic construct
  misc_feature 1..2670: note = Variant of RNA polymerase
  source 1..2670: mol_type = other DNA
atgcaccatcaccatcaccatatgaacacgattaacattgctaagaacgacttctctgacatcgaactggctgctatcccgttcaacactctggctgaccattacggtgagcgtttagctcgcgaacagttggcccttgagcatgagtcttacgagatgggtgaagcacgcttccgcaagatgtttgagcgtcaacttaaagctggtgaggttgcggataacgctgccgccaagcctctcatcactaccctactccctaagatgattgcacgcatcaacgactggtttgaggaagtgaaagctaagcgcggcaagcgcccgacagccttccagttcctgcaagaaatcaagccggaagccgtagcgtacatcaccattaagaccactctggcttgcctaaccagtgcggacaatacaaccgttcaggctgtagcaagcgcaatcggtcgggccattgaggacgaggctcgcttcggtcgtatccgtgaccttgaagctaagcacttcaagaagaacgttgaggaacaactcaacaagcgcgtagggcacgtctacaagaaagcatttatgcaagttgtcgagcacgacatgctctctaagggtctactcggtggcgaggcgtggtcttcgtggcataaggaagactctattcatgtaggagtacgctgcatcgagatgctcattgagtcaaccggaatggttagcttacaccgccaaaatgctggcgtagtaggtcaagactctgagactatcgaactcgcacctgaatacgctgaggctatcgcaacccgtgcaggtgcgctggctggcatctctccgatgttccaaccttgcgtagttcctcctaagccgtggactggcattactggtggtggctattgggctgcggggcgcaaacccctgcagttagtacgtactcgcagtctggcggcgcttcgccgctatgaagaagtgtcgatgccggaggtcatcaaagcagtcaacattgcgcagaatacagcatggcgtattaacaagaaagttctcgacgtagcgaataccatcacccaatggcagcactgtccagtcgcggatgtgcctgcgatggatcgtggcgaaatgccagctcgtccgttggacatcgataccaacgagattgcacttaaagcgtggaagaaagaagcttccgcgttctaccgccgtgacaaagcacgcgttagccgtcgtctgtcaatggagtttatgttatctcaggcgaacaagtttgcgaattatgaggcaatctggtttccgcaaaacatggattggcgtgggcgcgtgtacgctgtcccgatgttcaatcctcagggcaacgatatgacgaaaggcctgctgacctttgcgcaggagaaacccattggtgaagacggcttctattggctcaagattcatggcgcaaatacagctggagtggataaagtaccgtttccacaacgcatcaaatttgttgaggataaccatacgaatattatggaatgcgcgaaagcaccgctggaaaacacttggtgggcggaacaggactcgccgttctgttttctggcgttctgctttgagtatgctggcgtcatcaatagtggtctgtcgtacaactgtagcttgcctctggcatttgatggtagttgctccggcctgcaacatttctcagcgatgttacgcgacgaaattggcggcaaagctgtgaatctcctcccatctgcggaataccaggatatttatcgtatcgtcagcgacaaagttaacgagatgctgaaacaagatctgattaacggtacctctaccaccgtggaaacggtgactgataagaagacaggcgaaattacccaacgcacgaaatacgggaccaaagttatggcacagtggtggttagaacacggtgtgaatcgtggcgtcacgaaacgctcggttatgactttggtgtatgggagcaaagagtttggattccgcgatcaagtgctgagtgacaccattcaaccggcgatcgataacggcaaaggtgacatgtttctgaatccgaatcaggctgctggttacatggcgaaactgatctggaacgcagtgtccgggaccgtagtcgcagcagttgaggcgatgaactggctgaaaagtgcggcgaaattacttgctgctgaagtgaaggatcctaagacggatacagttctgcgtggccgctgcgcagtacattgggtgactcccgacggcttccctgtgtggcaggaatacaagaagcctattcagacgcgcttgaacctgatgttcctcggtcagttccgcttacagcctaccattaacaccaacaaagatagcgagattgatgcacacaaacaggagtctggtatcgctcctaactttgtacacagccaagacggtaaccaccttcgtatgactgtagtgtgggcacacgagaagtacggaatcgaatcttttgcactgattcacgactccttcggtaccattccggctgacgctgcgaacctgttcaaagcagtgcgcgaaactttcgttgacacatatgagtcttgtgatgtactggctgatttctacgaccagttcgctgaccagttgcacgagtctcaacgcgacaaaatgccagcacttccggctaaaggtaacttgaacctccgtgacatcttaaaatcggacttcgcgttcgcg

SEQ ID NO: 1330 - protein, 890 aa, synthetic construct
  REGION 1..890: note = Variant of RNA polymerase
MHHHHHHMNTINIAKNDFSDIELAAIPFNTLADHYGERLAREQLALEHESYEMGEARFRKMFERQLKAGEVADNAAAKPLITTLLPKMIARINDWFEEVKAKRGKRPTAFQFLQEIKPEAVAYITIKTTLACLTSADNTTVQAVASAIGRAIEDEARFGRIRDLEAKHFKKNVEEQLNKRVGHVYKKAFMQVVEHDMLSKGLLGGEAWSSWHKEDSIHVGVRCIEMLIESTGMVSLHRQNAGVVGQDSETIELAPEYAEAIATRAGALAGISPMFQPCVVPPKPWTGITGGGYWAAGRKPLQLVRTRSLAALRRYEEVSMPEVIKAVNIAQNTAWRINKKVLDVANTITQWQHCPVADVPAMDRGEMPARPLDIDTNEIALKAWKKEASAFYRRDKARVSRRLSMEFMLSQANKFANYEAIWFPQNMDWRGRVYAVPMFNPQGNDMTKGLLTFAQEKPIGEDGFYWLKIHGANTAGVDKVPFPQRIKFVEDNHTNIMECAKAPLENTWWAEQDSPFCFLAFCFEYAGVINSGLSYNCSLPLAFDGSCSGLQHFSAMLRDEIGGKAVNLLPSAEYQDIYRIVSDKVNEMLKQDLINGTSTTVETVTDKKTGEITQRTKYGTKVMAQWWLEHGVNRGVTKRSVMTLVYGSKEFGFRDQVLSDTIQPAIDNGKGDMFLNPNQAAGYMAKLIWNAVSGTVVAAVEAMNWLKSAAKLLAAEVKDPKTDTVLRGRCAVHWVTPDGFPVWQEYKKPIQTRLNLMFLGQFRLQPTINTNKDSEIDAHKQESGIAPNFVHSQDGNHLRMTVVWAHEKYGIESFALIHDSFGTIPADAANLFKAVRETFVDTYESCDVLADFYDQFADQLHESQRDKMPALPAKGNLNLRDILKSDFAFA

SEQ ID NO: 1331 - DNA, 2670 bp, synthetic construct
  misc_feature 1..2670: note = Variant of RNA polymerase
  source 1..2670: mol_type = other DNA
atgcaccatcaccatcaccatatgaacacgattaacattgctaagaacgacttctctgacatcgaactggctgctatcccgttcaacactctggctgaccattacggtgagcgtttagctcgcgaacagttggcccttgagcatgagtcttacgagatgggtgaagcacgcttccgcaagatgtttgagcgtcaacttaaagctggtgaggttgcggataacgctgccgccaagcctctcatcactaccctactccctaagatgattgcacgcatcaacgactggtttgaggaagtgaaagctaagcgcggcaagcgcccgacagccttccagttcctgcaagaaatcaagccggaagccgtagcgtacatcaccattaagaccactctggcttgcctaaccagtgcggacaatacaaccgttcaggctgtagcaagcgcaatcggtcgggccattgaggacgaggctcgcttcggtcgtatccgtgaccttgaagctaagcacttcaagaagaacgttgaggaacaactcaacaagcgcgtagggcacgtctacaagaaagcatttatgcaagttgtcgagcacgacatgctctctaagggtctactcggtggcgaggcgtggtcttcgtggcataaggaagactctattcatgtaggagtacgctgcatcgagatgctcattgagtcaaccggaatggttagcttacaccgccaaaatgctggcgtagtgggtgcagactctgagactatcgaactcgcacctgaatacgctgaggctatcgcaacccgtgcaggtgcgctggctggcatctctccgatgttccaaccttgcgtagttcctcctaagccgtggactggcattactggtggtggctattgggctgcggggcgcaaacccctgcagttagtacgtactcgcagtctggcggcgcttcgccgctatgaagaagtgtcgatgccggaggtcatcaaagcagtcaacattgcgcagaatacagcatggcgtattaacaagaaagttctcgacgtagcgaataccatcacccaatggcagcactgtccagtcgcggatgtgcctgcgatggatcgtggcgaaatgccagctcgtccgttggacatcgataccaacgagattgcacttaaagcgtggaagaaagaagcttccgcgttctaccgcaaagacaaagcacgcgttagccgtcgtctgtcaatggagtttatgttatctcaggcgaacaagtttgcgaattatgaggcaatctggtttccgcaaaacatggattggcgtgggcgcgtgtacgctgtcccgatgttcaatcctcagggcaacgatatgacgaaaggcctgctgacctttgcgcaggagaaacccattggtgaagacggcttctattggctcaagattcatggcgcaaatacagctggagtggataaagtaccgtttccacaacgcatcaaatttgttgaggataaccatacgaatattatggaatgcgcgaaagcaccgctggaaaacacttggtgggcggaacaggactcgccgttctgttttctggcgttctgctttgagtatgctggcgtcatcaatagtggtctgtcgtacaactgtagcttgcctctggcatttgatggtagttgctccggcctgcaacatttctcagcgatgttacgcgacgaaattggcggcaaagctgtgaatctcctcccatctgcggaataccaggatatttatcgtatcgtcagcgacaaagttaacgagatgctgaaacaagatctgattaacggtacctctaccaccgtggaaacggtgactgataagaagacaggcgaaattacccaacgcacgaaatacgggaccaaagttatggcacagtggtggttagaacacggtgtgaatcgtggcgtcacgaaacgctcggttatgactttggtgtatgggagcaaagagtttggattccgcgatcaagtgctgagtgacaccattcaacctgcgatcgataacggcaaaggtgacatgtttctgaatccgaatcaggctgctggttacatggcgaaactgatctggaacgcagtgtccgggaccgtagtcgcagcagttgaggcgatgaactggctgaaaagtgcggcgaaattacttgctgctgaagtgaaggatcctaagacggatacagttctgcgtggccgctgcgcagtacattgggtgactcccgacggcttccctgtgtggcaggaatacaagaagcctattcgtacgcgcttgaacctgatgttcctcggtcagttccgcttacagcctaccattaacaccaacaaagatagcgagattgatgcacacaaacaggagtctggtatcgctcctaactttgtacacagccaagacggtaaccaccttcgtatgactgtagtgtgggcacacgagaagtacggaatcgaatcttttgcactgattcacgactccttcggtaccattccggctgacgctgcgaacctgttcaaagcagtgcgcgaaactttcgttgacacatatgagtcttgtgatgtactggctgatttctacgaccagttcgctgaccagttgcacgagtctcaacgcgacaaaatgccagcacttccggctaaaggtaacttgaacctccgtgacatcttaaaatcggacttcgcgttcgcg

SEQ ID NO: 1332 - protein, 890 aa, synthetic construct
  REGION 1..890: note = Variant of RNA polymerase
MHHHHHHMNTINIAKNDFSDIELAAIPFNTLADHYGERLAREQLALEHESYEMGEARFRKMFERQLKAGEVADNAAAKPLITTLLPKMIARINDWFEEVKAKRGKRPTAFQFLQEIKPEAVAYITIKTTLACLTSADNTTVQAVASAIGRAIEDEARFGRIRDLEAKHFKKNVEEQLNKRVGHVYKKAFMQVVEHDMLSKGLLGGEAWSSWHKEDSIHVGVRCIEMLIESTGMVSLHRQNAGVVGADSETIELAPEYAEAIATRAGALAGISPMFQPCVVPPKPWTGITGGGYWAAGRKPLQLVRTRSLAALRRYEEVSMPEVIKAVNIAQNTAWRINKKVLDVANTITQWQHCPVADVPAMDRGEMPARPLDIDTNEIALKAWKKEASAFYRKDKARVSRRLSMEFMLSQANKFANYEAIWFPQNMDWRGRVYAVPMFNPQGNDMTKGLLTFAQEKPIGEDGFYWLKIHGANTAGVDKVPFPQRIKFVEDNHTNIMECAKAPLENTWWAEQDSPFCFLAFCFEYAGVINSGLSYNCSLPLAFDGSCSGLQHFSAMLRDEIGGKAVNLLPSAEYQDIYRIVSDKVNEMLKQDLINGTSTTVETVTDKKTGEITQRTKYGTKVMAQWWLEHGVNRGVTKRSVMTLVYGSKEFGFRDQVLSDTIQPAIDNGKGDMFLNPNQAAGYMAKLIWNAVSGTVVAAVEAMNWLKSAAKLLAAEVKDPKTDTVLRGRCAVHWVTPDGFPVWQEYKKPIRTRLNLMFLGQFRLQPTINTNKDSEIDAHKQESGIAPNFVHSQDGNHLRMTVVWAHEKYGIESFALIHDSFGTIPADAANLFKAVRETFVDTYESCDVLADFYDQFADQLHESQRDKMPALPAKGNLNLRDILKSDFAFA

SEQ ID NO: 1333 - DNA, 2670 bp, synthetic construct
  misc_feature 1..2670: note = Variant of RNA polymerase
  source 1..2670: mol_type = other DNA
atgcaccatcaccatcaccatatgaacacgattaacattgctaagaacgacttctctgacatcgaactggctgctatcccgttcaacactctggctgaccattacggtgagcgtttagctcgcgaacagttggcccttgagcatgagtcttacgagatgggtgaagcacgcttccgcaagatgtttgagcgtcaacttaaagctggtgaggttgcggataacgctgccgccaagcctctcatcactaccctactccctaagatgattgcacgcatcaacgactggtttgaggaagtgaaagctaagcgcggcaagcgcccgacagccttccagttcctgcaagaaatcaagccggaagccgtagcgtacatcaccattaagaccactctggcttgcctaaccagtgcggacaatacaaccgttcaggctgtagcaagcgcaatcggtcgggccattgaggacgaggctcgcttcggtcgtatccgtgaccttgaagctaagcacttcaagaagaacgttgaggaacaactcaacaagcgcgtagggcacgtctacaagaaagcatttatgcaagttgtcgagcacgacatgctctctaagggtctactcggtggcgaggcgtggtcttcgtggcataaggaagactctattcatgtaggagtacgctgcatcgagatgctcattgagtcaaccggaatggttagcttacaccgccaaaatgctggcgtagtaggtcaagactctgagactatcgaactcgcacctgaatacgctgaggctatcgcaacccgtgcaggtgcgctggctggcatctctccgatgttccaaccttgcgtagttcctcctaagccgtggactggcattactggtggtggctattgggctgcggggcgcaaacccctgcagttagtacgtactcgcagtctggcggcgcttcgccgctatgaagaagtgtcgatgccggaggtcatcaaagcagtcaacattgcgcagaatacagcatggcgtattaacaagaaagttctcgacgtagcgaataccatcacccaatggcagcactgtccagtcgcggatgtgcctgcgatggatcgtggcgaaatgccagctcgtccgttggacatcgataccaacgagattgcacttaaagcgtggaagaaagaagcttccgcgttctaccgcaaagacaaagcacgcgttagccgtcgtctgtcaatggagtttatgttatctcaggcgaacaagtttgcgaattatgaggcaatctggtttccgcaaaacatggattggcgtgggcgcgtgtacgctgtcccgatgttcaatcctcagggcaacgatatgacgaaaggcctgctgacctttgcgcaggagaaacccattggtgaagacggcttctattggctcaagattcatggcgcaaatacagctggagtggataaagtaccgtttccacaacgcatcaaatttgttgaggataaccatacgaatattatggcgtgcgcgaaagcaccgctggaaaacacttggtgggcggaacaggactcgccgttctgttttctggcgttctgctttgagtatgctggcgtcatcaatagtggtctgtcgtacaactgtagcttgcctctggcatttgatggtagttgctccggcctgcaacatttctcagcgatgttacgcgacgaaattggcggcaaagctgtgaatctcctcccatctgcggaataccaggatatttatcgtatcgtcagcgacaaagttaacgagatgctgaaacaagatctgattaacggtacctctaccaccgtggaaacggtgactgataagaagacaggcgaaattacccaacgcacgaaatacgggaccaaagttatggcacagtggtggttagaacacggtgtgaatcgtggcgtcacgaaacgctcggttatgactttggtgtatgggagcaaagagtttggattccgcgatcaagtgctgagtgacaccattcaaccggcgatcgataacggcaaaggtgacatgtttctgaatccgaatcaggctgctggttacatggcgaaactgatctggaacgcagtgtccgggaccgtagtcgcagcagttgaggcgatgaactggctgaaaagtgcggcgaaattacttgctgctgaagtgaaggatcctaagacggatacagttctgcgtggccgctgcgcagtacattgggtgactcccgacggcttccctgtgtggcaggaatacaagaagcctattcagacgcgcttgaacctgatgttcctcggtcagttccgcttacagcctaccattaacaccaacaaagatagcgagattgatgcacacaaacaggagtctggtatcgctcctaactttgtacacagccaagacggtaaccaccttcgtatgactgtagtgtgggcacacgagaagtacggaatcgaatcttttgcactgattcacgactccttcggtaccattccggctgacgctgcgaacctgttcaaagcagtgcgcgaaactttcgttgacacatatgagtcttgtgatgtactggctgatttctacgaccagttcgctgaccagttgcacgagtctcaacgcgacaaaatgccagcacttccggctaaaggtaacttgaacctccgtgacatcttaaaatcggacttcgcgttcgcg

SEQ ID NO: 1334 - protein, 890 aa, synthetic construct
  REGION 1..890: note = Variant of RNA polymerase
MHHHHHHMNTINIAKNDFSDIELAAIPFNTLADHYGERLAREQLALEHESYEMGEARFRKMFERQLKAGEVADNAAAKPLITTLLPKMIARINDWFEEVKAKRGKRPTAFQFLQEIKPEAVAYITIKTTLACLTSADNTTVQAVASAIGRAIEDEARFGRIRDLEAKHFKKNVEEQLNKRVGHVYKKAFMQVVEHDMLSKGLLGGEAWSSWHKEDSIHVGVRCIEMLIESTGMVSLHRQNAGVVGQDSETIELAPEYAEAIATRAGALAGISPMFQPCVVPPKPWTGITGGGYWAAGRKPLQLVRTRSLAALRRYEEVSMPEVIKAVNIAQNTAWRINKKVLDVANTITQWQHCPVADVPAMDRGEMPARPLDIDTNEIALKAWKKEASAFYRKDKARVSRRLSMEFMLSQANKFANYEAIWFPQNMDWRGRVYAVPMFNPQGNDMTKGLLTFAQEKPIGEDGFYWLKIHGANTAGVDKVPFPQRIKFVEDNHTNIMACAKAPLENTWWAEQDSPFCFLAFCFEYAGVINSGLSYNCSLPLAFDGSCSGLQHFSAMLRDEIGGKAVNLLPSAEYQDIYRIVSDKVNEMLKQDLINGTSTTVETVTDKKTGEITQRTKYGTKVMAQWWLEHGVNRGVTKRSVMTLVYGSKEFGFRDQVLSDTIQPAIDNGKGDMFLNPNQAAGYMAKLIWNAVSGTVVAAVEAMNWLKSAAKLLAAEVKDPKTDTVLRGRCAVHWVTPDGFPVWQEYKKPIQTRLNLMFLGQFRLQPTINTNKDSEIDAHKQESGIAPNFVHSQDGNHLRMTVVWAHEKYGIESFALIHDSFGTIPADAANLFKAVRETFVDTYESCDVLADFYDQFADQLHESQRDKMPALPAKGNLNLRDILKSDFAFA

SEQ ID NO: 1335 - DNA, 2670 bp, synthetic construct
  misc_feature 1..2670: note = Variant of RNA polymerase
  source 1..2670: mol_type = other DNA
atgcaccatcaccatcaccatatgaacacgattaacattgctaagaacgacttctctgacatcgaactggctgctatcccgttcaacactctggctgaccattacggtgagcgtttagctcgcgaacagttggcccttgagcatgagtcttacgagatgggtgaagcacgcttccgcaagatgtttgagcgtcaacttaaagctggtgaggttgcggataacgctgccgccaagcctctcatcactaccctactccctaagatgattgcacgcatcaacgactggtttgaggaagtgaaagctaagcgcggcaagcgcccgacagccttccagttcctgcaagaaatcaagccggaagccgtagcgtacatcaccattaagaccactctggcttgcctaaccagtgcggacaatacaaccgttcaggctgtagcaagcgcaatcggtcgggccattgaggacgaggctcgcttcggtcgtatccgtgaccttgaagctaagcacttcaagaagaacgttgaggaacaactcaacaagcgcgtagggcacgtctacaagaaagcatttatgcaagttgtcgagcacgacatgctctctaagggtctactcggtggcgaggcgtggtcttcgtggcataaggaagactctattcatgtaggagtacgctgcatcgagatgctcattgagtcaaccggaatggttagcttacaccgccaaaatgctggcgtagtaggtcaagactctgagactatcgaactcgcacctgaatacgctgaggctatcgcaacccgtgcaggtgcgctggctggcatctctccgatgttccaaccttgcgtagttcctcctaagccgtggactggcattactggtggtggctattgggctgcggggcgcaaacccctgcagttagtacgtactcgcagtctggcggcgcttcgccgctatgaagaagtgtcgatgccggaggtcatcaaagcagtcaacattgcgcagaatacagcatggcgtattaacaagaaagttctcgacgtagcgaataccatcacccaatggcagcactgtccagtcgcggatgtgcctgcgatggatcgtggcgaaatgccagctcgtccgttggacatcgataccaacgagattgcacttaaagcgtggaagaaagaagcttccgcgttctaccgcaaagacaaagcacgcgttagccgtcgtctgtcaatggagtttatgttatctcaggcgaacaagtttgcgaattatgaggcaatctggtttccgcaaaacatggattggcgtgggcgcgtgtacgctgtcccgatgttcaatcctcagggcaacgatatgacgaaaggcctgctgacctttgcgcaggagaaacccattggtgaagacggcttctattggctcaagattcatggcgcaaatacagctggagtggataaagtaccgtttccacaacgcatcaaatttgttgaggataaccatacgaatattatggaatgcgcgaaagcaccgctggaaaacacttggtgggcggaacaggactcgccgttctgttttctggcgttctgctttgagtatgctggcgtcatcaatagtggtctgtcgtacaactgtagcttgcctctggcatttgatggtagttgctccggcctgcaacatttctcagcgatgttacgcgacgaaattggcggcaaagctgtgaatctcctcccatctgcggaataccaggatatttatcgtatcgtcagcgacaaagttaacgagatgctgaaacaagatctgattaacggtacctctaccaccgtggaaacggtgactgataagaagacaggcgaaattacccaacgcgttaaatacgggaccaaagttatggcacagtggtggttagaacacggtgtgaatcgtggcgtcacgaaacgctcggttatgactttggtgtatgggagcaaagagtttggattccgcgatcaagtgctgagtgacaccattcaaccggcgatcgataacggcaaaggtgacatgtttctgaatccgaatcaggctgctggttacatggcgaaactgatctggaacgcagtgtccgggaccgtagtcgcagcagttgaggcgatgaactggctgaaaagtgcggcgaaattacttgctgctgaagtgaaggatcctaagacggatacagttctgcgtggccgctgcgcagtacattgggtgactcccgacggcttccctgtgtggcaggaatacaagaagcctattcagacgcgcttgaacctgatgttcctcggtcagttccgcttacagcctaccattaacaccaacaaagatagcgagattgatgcacacaaacaggagtctggtatcgctcctaactttgtacacagccaagacggtaaccaccttcgtatgactgtagtgtgggcacacgagaagtacggaatcgaatcttttgcactgattcacgactccttcggtaccattccggctgacgctgcgaacctgttcaaagcagtgcgcgaaactttcgttgacacatatgagtcttgtgatgtactggctgatttctacgaccagttcgctgaccagttgcacgagtctcaacgcgacaaaatgccagcacttccggctaaaggtaacttgaacctccgtgacatcttaaaatcggacttcgcgttcgcg

SEQ ID NO: 1336 - protein, 890 aa, synthetic construct
  REGION 1..890: note = Variant of RNA polymerase
MHHHHHHMNTINIAKNDFSDIELAAIPFNTLADHYGERLAREQLALEHESYEMGEARFRKMFERQLKAGEVADNAAAKPLITTLLPKMIARINDWFEEVKAKRGKRPTAFQFLQEIKPEAVAYITIKTTLACLTSADNTTVQAVASAIGRAIEDEARFGRIRDLEAKHFKKNVEEQLNKRVGHVYKKAFMQVVEHDMLSKGLLGGEAWSSWHKEDSIHVGVRCIEMLIESTGMVSLHRQNAGVVGQDSETIELAPEYAEAIATRAGALAGISPMFQPCVVPPKPWTGITGGGYWAAGRKPLQLVRTRSLAALRRYEEVSMPEVIKAVNIAQNTAWRINKKVLDVANTITQWQHCPVADVPAMDRGEMPARPLDIDTNEIALKAWKKEASAFYRKDKARVSRRLSMEFMLSQANKFANYEAIWFPQNMDWRGRVYAVPMFNPQGNDMTKGLLTFAQEKPIGEDGFYWLKIHGANTAGVDKVPFPQRIKFVEDNHTNIMECAKAPLENTWWAEQDSPFCFLAFCFEYAGVINSGLSYNCSLPLAFDGSCSGLQHFSAMLRDEIGGKAVNLLPSAEYQDIYRIVSDKVNEMLKQDLINGTSTTVETVTDKKTGEITQRVKYGTKVMAQWWLEHGVNRGVTKRSVMTLVYGSKEFGFRDQVLSDTIQPAIDNGKGDMFLNPNQAAGYMAKLIWNAVSGTVVAAVEAMNWLKSAAKLLAAEVKDPKTDTVLRGRCAVHWVTPDGFPVWQEYKKPIQTRLNLMFLGQFRLQPTINTNKDSEIDAHKQESGIAPNFVHSQDGNHLRMTVVWAHEKYGIESFALIHDSFGTIPADAANLFKAVRETFVDTYESCDVLADFYDQFADQLHESQRDKMPALPAKGNLNLRDILKSDFAFA

SEQ ID NO: 1337 - DNA, 2670 bp, synthetic construct
  misc_feature 1..2670: note = Variant of RNA polymerase
  source 1..2670: mol_type = other DNA
atgcaccatcaccatcaccatatgaacacgattaacattgctaagaacgacttctctgacatcgaactggctgctatcccgttcaacactctggctgaccattacggtgagcgtttagctcgcgaacagttggcccttgagcatgagtcttacgagatgggtgaagcacgcttccgcaagatgtttgagcgtcaacttaaagctggtgaggttgcggataacgctgccgccaagcctctcatcactaccctactccctaagatgattgcacgcatcaacgactggtttgaggaagtgaaagctaagcgcggcaagcgcccgacagccttccagttcctgcaagaaatcaagccggaagccgtagcgtacatcaccattaagaccactctggcttgcctaaccagtgcggacaatacaaccgttcaggctgtagcaagcgcaatcggtcgggccattgaggacgaggctcgcttcggtcgtatccgtgaccttgaagctaagcacttcaagaagaacgttgaggaacaactcaacaagcgcgtagggcacgtctacaagaaagcatttatgcaagttgtcgagcacgacatgctctctaagggtctactcggtggcgaggcgtggtcttcgtggcataaggaagactctattcatgtaggagtacgctgcatcgagatgctcattgagtcaaccggaatggttagcttacaccgccaaaatgctggcgtagtaggtcaagactctgagactatcgaactcgcacctgaatacgctgaggctatcgcaacccgtgcaggtgcgctggctggcatctctccgatgttccaaccttgcgtagttcctcctaagccgtggactggcattactggtggtggctattgggctgcggggcgcaaacccctgcagttagtacgtactcgcagtctggcggcgcttcgccgctatgaagaagtgtcgatgccggaggtcatcaaagcagtcaacattgcgcagaatacagcatggcgtattaacaagaaagttctcgacgtagcgaataccatcacccaatggcagcactgtccagtcgcggatgtgcctgcgatggatcgtggcgaaatgccagctcgtccgttggacatcgataccaacgagattgcacttaaagcgtggaagaaagaagcttccgcgttctaccgcaaagacaaagcacgcgttagccgtcgtatctcaatggagtttatgttatctcaggcgaacaagtttgcgaattatgaggcaatctggtttccgcaaaacatggattggcgtgggcgcgtgtacgctgtcccgatgttcaatcctcagggcaacgatatgacgaaaggcctgctgacctttgcgcaggagaaacccattggtgaagacggcttctattggctcaagattcatggcgcaaatacagctggagtggataaagtaccgtttccacaacgcatcaaatttgttgaggataaccatacgaatattatggaatgcgcgaaagcaccgctggaaaacacttggtgggcggaacaggactcgccgttctgttttctggcgttctgctttgagtatgctggcgtcatcaatagtggtctgtcgtacaactgtagcttgcctctggcatttgatggtagttgctccggcctgcaacatttctcagcgatgttacgcgacgaaattggcggcaaagctgtgaatctcctcccatctgcggaataccaggatatttatcgtatcgtcagcgacaaagttaacgagatgctgaaacaagatctgattaacggtacctctaccaccgtggaaacggtgactgataagaagacaggcgaaattacccaacgcacgaaatacgggaccaaagttatggcacagtggtggttagaacacggtgtgaatcgtggcgtcacgaaacgctcggttatgactttggtgtatgggagcaaagagtttggattccgcgatcaagtgctgagtgacaccattcaaccggcgatcgataacggcaaaggtgacatgtttctgaatccgaatcaggctgctggttacatggcgaaactgatctggaacgcagtgtccgggaccgtagtcgcagcagttgaggcgatgaactggctgaaaagtgcggcgaaattacttgctgctgaagtgaaggatcctaagacggatacagttctgcgtggccgctgcgcagtacattgggtgactcccgacggcttccctgtgtggcaggaatacaagaagcctattcagacgcgcttgaacctgatgttcctcggtcagttccgcttacagcctaccattaacaccaacaaagatagcgagattgatgcacacaaacaggagtctggtatcgctcctaactttgtacacagccaagacggtaaccaccttcgtatgactgtagtgtgggcacacgagaagtacggaatcgaatcttttgcactgattcacgactccttcggtaccattccggctgacgctgcgaacctgttcaaagcagtgcgcgaaactttcgttgacacatatgagtcttgtgatgtactggctgatttctacgaccagttcgctgaccagttgcacgagtctcaacgcgacaaaatgccagcacttccggctaaaggtaacttgaacctccgtgacatcttaaaatcggacttcgcgttcgcg

SEQ ID NO: 1338 - protein, 890 aa, synthetic construct
  REGION 1..890: note = Variant of RNA polymerase
MHHHHHHMNTINIAKNDFSDIELAAIPFNTLADHYGERLAREQLALEHESYEMGEARFRKMFERQLKAGEVADNAAAKPLITTLLPKMIARINDWFEEVKAKRGKRPTAFQFLQEIKPEAVAYITIKTTLACLTSADNTTVQAVASAIGRAIEDEARFGRIRDLEAKHFKKNVEEQLNKRVGHVYKKAFMQVVEHDMLSKGLLGGEAWSSWHKEDSIHVGVRCIEMLIESTGMVSLHRQNAGVVGQDSETIELAPEYAEAIATRAGALAGISPMFQPCVVPPKPWTGITGGGYWAAGRKPLQLVRTRSLAALRRYEEVSMPEVIKAVNIAQNTAWRINKKVLDVANTITQWQHCPVADVPAMDRGEMPARPLDIDTNEIALKAWKKEASAFYRKDKARVSRRISMEFMLSQANKFANYEAIWFPQNMDWRGRVYAVPMFNPQGNDMTKGLLTFAQEKPIGEDGFYWLKIHGANTAGVDKVPFPQRIKFVEDNHTNIMECAKAPLENTWWAEQDSPFCFLAFCFEYAGVINSGLSYNCSLPLAFDGSCSGLQHFSAMLRDEIGGKAVNLLPSAEYQDIYRIVSDKVNEMLKQDLINGTSTTVETVTDKKTGEITQRTKYGTKVMAQWWLEHGVNRGVTKRSVMTLVYGSKEFGFRDQVLSDTIQPAIDNGKGDMFLNPNQAAGYMAKLIWNAVSGTVVAAVEAMNWLKSAAKLLAAEVKDPKTDTVLRGRCAVHWVTPDGFPVWQEYKKPIQTRLNLMFLGQFRLQPTINTNKDSEIDAHKQESGIAPNFVHSQDGNHLRMTVVWAHEKYGIESFALIHDSFGTIPADAANLFKAVRETFVDTYESCDVLADFYDQFADQLHESQRDKMPALPAKGNLNLRDILKSDFAFA

SEQ ID NO: 1339 - DNA, 2670 bp, synthetic construct
  misc_feature 1..2670: note = Variant of RNA polymerase
  source 1..2670: mol_type = other DNA
atgcaccatcaccatcaccatatgaacacgattaacattgctaagaacgacttctctgacatcgaactggctgctatcccgttcaacactctggctgaccattacggtgagcgtttagctcgcgaacagttggcccttgagcatgagtcttacgagatgggtgaagcacgcttccgcaagatgtttgagcgtcaacttaaagctggtgaggttgcggataacgctgccgccaagcctctcatcactaccctactccctaagatgattgcacgcatcaacgactggtttgaggaagtgaaagctaagcgcggcaagcgcccgacagccttccagttcctgcaagaaatcaagccggaagccgtagcgtacatcaccattaagaccactctggcttgcctaaccagtgcggacaatacaaccgttcaggctgtagcaagcgcaatcggtcgggccattgaggacgaggctcgcttcggtcgtatccgtgaccttgaagctaagcacttcaagaagaacgttgaggaacaactcaacaagcgcgtagggcacgtctacaagaaagcatttatgcaagttgtcgagcacgacatgctctctaagggtctactcggtggcgaggcgtggtcttcgtggcataaggaagactctattcatgtaggagtacgctgcatcgagatgctcattgagtcaaccggaatggttagcttacaccgccaaaatgctggcgtagtaggtcaagactctgagactatcgaactcgcacctgaatacgctgaggctatcgcaacccgtgcaggtgcgctggctggcatctctccgatgttccaaccttgcgtagttcctcctaagccgtggactggcattactggtggtggctattgggctgcggggcgcaaacccctgcagttagtacgtactcgcagtctggcggcgcttcgccgctatgaagaagtgtcgatgccggaggtcatcaaagcagtcaacattgcgcagaatacagcatggcgtattaacaagaaagttctcgacgtagcgaataccatcacccaatggcagcactgtccagtcgcggatgtgcctgcgatggatcgtggcgaaatgccagctcgtccgttggacatcgataccaacgagattgcacttaaagcgtggaagaaagaagcttccgcgttctaccgcaaagacaaagcacgcgttagccgtcgtctgtcaatggagtttatgttatctcaggcgaacaagtttgcgaattatgaggcaatctggtttccgcaaaacatggattggcgtgggcgcgtgtacgctgtcccgatgttcaatcctcagggcaacgatatgacgaaaggcctgctgacctttgcgcaggagaaacccattggtgaagacggcttctattggctcaagattcatggcgcaaatacagctggagtggataaagtaccgtttccacaacgcatcaaatttgttgaggataaccatacgaatattatggaatgcgcgaaagcaccgctggaaaacacttggtgggcggaacaggactcgccgttctgttttctggcgttctgctttgagtatgctggcgtcatcaatagtggtctgtcgtacaactgtagcttgcctctggcatttgatggtagttgctccggcctgcaacatttctcagcgatgttacgcgacgaaattggcggcaaagctgtgaatctcctcccatctgcggaataccaggatatttatcgtatcgtcagcgacaaagttaacgagatgctgaaacaagatctgattaacggtacctctaccaccgtggaaacggtgactgataagaagacaggcgaaattagccaacgcacgaaatacgggaccaaagttatggcacagtggtggttagaacacggtgtgaatcgtggcgtcacgaaacgctcggttatgactttggtgtatgggagcaaagagtttggattccgcgatcaagtgctgagtgacaccattcaaccggcgatcgataacggcaaaggtgacatgtttctgaatccgaatcaggctgctggttacatggcgaaactgatctggaacgcagtgtccgggaccgtagtcgcagcagttgaggcgatgaactggctgaaaagtgcggcgaaattacttgctgctgaagtgaaggatcctaagacggatacagttctgcgtggccgctgcgcagtacattgggtgactcccgacggcttccctgtgtggcaggaatacaagaagcctattcagacgcgcttgaacctgatgttcctcggtcagttccgcttacagcctaccattaacaccaacaaagatagcgagattgatgcacacaaacaggagtctggtatcgctcctaactttgtacacagccaagacggtaaccaccttcgtatgactgtagtgtgggcacacgagaagtacggaatcgaatcttttgcactgattcacgactccttcggtaccattccggctgacgctgcgaacctgttcaaagcagtgcgcgaaactttcgttgacacatatgagtcttgtgatgtactggctgatttctacgaccagttcgctgaccagttgcacgagtctcaacgcgacaaaatgccagcacttccggctaaaggtaacttgaacctccgtgacatcttaaaatcggacttcgcgttcgcg

SEQ ID NO: 1340 - protein, 890 aa, synthetic construct
  REGION 1..890: note = Variant of RNA polymerase
MHHHHHHMNTINIAKNDFSDIELAAIPFNTLADHYGERLAREQLALEHESYEMGEARFRKMFERQLKAGEVADNAAAKPLITTLLPKMIARINDWFEEVKAKRGKRPTAFQFLQEIKPEAVAYITIKTTLACLTSADNTTVQAVASAIGRAIEDEARFGRIRDLEAKHFKKNVEEQLNKRVGHVYKKAFMQVVEHDMLSKGLLGGEAWSSWHKEDSIHVGVRCIEMLIESTGMVSLHRQNAGVVGQDSETIELAPEYAEAIATRAGALAGISPMFQPCVVPPKPWTGITGGGYWAAGRKPLQLVRTRSLAALRRYEEVSMPEVIKAVNIAQNTAWRINKKVLDVANTITQWQHCPVADVPAMDRGEMPARPLDIDTNEIALKAWKKEASAFYRKDKARVSRRLSMEFMLSQANKFANYEAIWFPQNMDWRGRVYAVPMFNPQGNDMTKGLLTFAQEKPIGEDGFYWLKIHGANTAGVDKVPFPQRIKFVEDNHTNIMECAKAPLENTWWAEQDSPFCFLAFCFEYAGVINSGLSYNCSLPLAFDGSCSGLQHFSAMLRDEIGGKAVNLLPSAEYQDIYRIVSDKVNEMLKQDLINGTSTTVETVTDKKTGEISQRTKYGTKVMAQWWLEHGVNRGVTKRSVMTLVYGSKEFGFRDQVLSDTIQPAIDNGKGDMFLNPNQAAGYMAKLIWNAVSGTVVAAVEAMNWLKSAAKLLAAEVKDPKTDTVLRGRCAVHWVTPDGFPVWQEYKKPIQTRLNLMFLGQFRLQPTINTNKDSEIDAHKQESGIAPNFVHSQDGNHLRMTVVWAHEKYGIESFALIHDSFGTIPADAANLFKAVRETFVDTYESCDVLADFYDQFADQLHESQRDKMPALPAKGNLNLRDILKSDFAFA

SEQ ID NO: 1341 - DNA, 2670 bp, synthetic construct
  misc_feature 1..2670: note = Variant of RNA polymerase
  source 1..2670: mol_type = other DNA
atgcaccatcaccatcaccatatgaacacgattaacattgctaagaacgacttctctgacatcgaactggctgctatcccgttcaacactctggctgaccattacggtgagcgtttagctcgcgaacagttggcccttgagcatgagtcttacgagatgggtgaagcacgcttccgcaagatgtttgagcgtcaacttaaagctggtgaggttgcggataacgctgccgccaagcctctcatcactaccctactccctaagatgattgcacgcatcaacgactggtttgaggaagtgaaagctaagcgcggcaagcgcccgacagccttccagttcctgcaagaaatcaagccggaagccgtagcgtacatcaccattaagaccactctggcttgcctaaccagtgcggacaatacaaccgttcaggctgtagcaagcgcaatcggtcgggccattgaggacgaggctcgcttcggtcgtatccgtgaccttgaagctaagcacttcaagaagaacgttgaggaacaactcaacaagcgcgtagggcacgtctacaagaaagcatttatgcaagttgtcgagcacgacatgctctctaagggtctactcggtggcgaggcgtggtcttcgtggcataaggaagactctattcatgtaggagtacgctgcatcgagatgctcattgagtcaaccggaatggttagcttacaccgccaaaatgctggcgtagtaggtcaagactctgagactatcgaactcgcacctgaatacgctgaggctatcgcaacccgtgcaggtgcgctggctggcatctctccgatgttccaaccttgcgtagttcctcctaagccgtggactggcattactggtggtggctattgggctgcggggcgcaaacccctgcagttagtacgtactcgcagtctggcggcgcttcgccgctatgaagaagtgtcgatgccggaggtcatcaaagcagtcaacattgcgcagaatacagcatggcgtattaacaagaaagttctcgacgtagcgaataccatcacccaatggaaacactgtccagtcgcggatgtgcctgcgatggatcgtggcgaaatgccagctcgtccgttggacatcgataccaacgagattgcacttaaagcgtggaagaaagaagcttccgcgttctaccgcaaagacaaagcacgcgttagccgtcgtctgtcaatggagtttatgttatctcaggcgaacaagtttgcgaattatgaggcaatctggtttccgcaaaacatggattggcgtgggcgcgtgtacgctgtcccgatgttcaatcctcagggcaacgatatgacgaaaggcctgctgacctttgcgcaggagaaacccattggtgaagacggcttctattggctcaagattcatggcgcaaatacagctggagtggataaagtaccgtttccacaacgcatcaaatttgttgaggataaccatacgaatattatggaatgcgcgaaagcaccgctggaaaacacttggtgggcggaacaggactcgccgttctgttttctggcgttctgctttgagtatgctggcgtcatcaatagtggtctgtcgtacaactgtagcttgcctctggcatttgatggtagttgctccggcctgcaacatttctcagcgatgttacgcgacgaaattggcggcaaagctgtgaatctcctcccatctgcggaataccaggatatttatcgtatcgtcagcgacaaagttaacgagatgctgaaacaagatctgattaacggtacctctaccaccgtggaaacggtgactgataagaagacaggcgaaattacccaacgcacgaaatacgggaccaaagttatggcacagtggtggttagaacacggtgtgaatcgtggcgtcacgaaacgctcggttatgactttggtgtatgggagcaaagagtttggattccgcgatcaagtgctgagtgacaccattcaaccggcgatcgataacggcaaaggtgacatgtttctgaatccgaatcaggctgctggttacatggcgaaactgatctggaacgcagtgtccgggaccgtagtcgcagcagttgaggcgatgaactggctgaaaagtgcggcgaaattacttgctgctgaagtgaaggatcctaagacggatacagttctgcgtggccgctgcgcagtacattgggtgactcccgacggcttccctgtgtggcaggaatacaagaagcctattcagacgcgcttgaacctgatgttcctcggtcagttccgcttacagcctaccattaacaccaacaaagatagcgagattgatgcacacaaacaggagtctggtatcgctcctaactttgtacacagccaagacggtaaccaccttcgtatgactgtagtgtgggcacacgagaagtacggaatcgaatcttttgcactgattcacgactccttcggtaccattccggctgacgctgcgaacctgttcaaagcagtgcgcgaaactttcgttgacacatatgagtcttgtgatgtactggctgatttctacgaccagttcgctgaccagttgcacgagtctcaacgcgacaaaatgccagcacttccggctaaaggtaacttgaacctccgtgacatcttaaaatcggacttcgcgttcgcg

SEQ ID NO: 1342 - protein, 890 aa, synthetic construct
  REGION 1..890: note = Variant of RNA polymerase
MHHHHHHMNTINIAKNDFSDIELAAIPFNTLADHYGERLAREQLALEHESYEMGEARFRKMFERQLKAGEVADNAAAKPLITTLLPKMIARINDWFEEVKAKRGKRPTAFQFLQEIKPEAVAYITIKTTLACLTSADNTTVQAVASAIGRAIEDEARFGRIRDLEAKHFKKNVEEQLNKRVGHVYKKAFMQVVEHDMLSKGLLGGEAWSSWHKEDSIHVGVRCIEMLIESTGMVSLHRQNAGVVGQDSETIELAPEYAEAIATRAGALAGISPMFQPCVVPPKPWTGITGGGYWAAGRKPLQLVRTRSLAALRRYEEVSMPEVIKAVNIAQNTAWRINKKVLDVANTITQWKHCPVADVPAMDRGEMPARPLDIDTNEIALKAWKKEASAFYRKDKARVSRRLSMEFMLSQANKFANYEAIWFPQNMDWRGRVYAVPMFNPQGNDMTKGLLTFAQEKPIGEDGFYWLKIHGANTAGVDKVPFPQRIKFVEDNHTNIMECAKAPLENTWWAEQDSPFCFLAFCFEYAGVINSGLSYNCSLPLAFDGSCSGLQHFSAMLRDEIGGKAVNLLPSAEYQDIYRIVSDKVNEMLKQDLINGTSTTVETVTDKKTGEITQRTKYGTKVMAQWWLEHGVNRGVTKRSVMTLVYGSKEFGFRDQVLSDTIQPAIDNGKGDMFLNPNQAAGYMAKLIWNAVSGTVVAAVEAMNWLKSAAKLLAAEVKDPKTDTVLRGRCAVHWVTPDGFPVWQEYKKPIQTRLNLMFLGQFRLQPTINTNKDSEIDAHKQESGIAPNFVHSQDGNHLRMTVVWAHEKYGIESFALIHDSFGTIPADAANLFKAVRETFVDTYESCDVLADFYDQFADQLHESQRDKMPALPAKGNLNLRDILKSDFAFA

SEQ ID NO: 1343 - DNA, 2670 bp, synthetic construct
  misc_feature 1..2670: note = Variant of RNA polymerase
  source 1..2670: mol_type = other DNA
atgcaccatcaccatcaccatatgaacacgattaacattgctaagaacgacttctctgacatcgaactggctgctatcccgttcaacactctggctgaccattacggtgagcgtttagctcgcgaacagttggcccttgagcatgagtcttacgagatgggtgaagcacgcttccgcaagatgtttgagcgtcaacttaaagctggtgaggttgcggataacgctgccgccaagcctctcatcactaccctactccctaagatgattgcacgcatcaacgactggtttgaggaagtgaaagctaagcgcggcaagcgcccgacagccttccagttcctgcaagaaatcaagccggaagccgtagcgtacatcaccattaagaccactctggcttgcctaaccagtgcggacaatacaaccgttcaggctgtagcaagcgcaatcggtcgggccattgaggacgaggctcgcttcggtcgtatccgtgaccttgaagctaagcacttcaagaagaacgttgaggaacaactcaacaagcgcgtagggcacgtctacaagaaagcatttatgcaagttgtcgagcacgacatgctctctaagggtctactcggtggcgaggcgtggtcttcgtggcataaggaagactctattcatgtaggagtacgctgcatcgagatgctcattgagtcaaccggaatggttagcttacaccgccaaaatgctggcgtagtaggtcaagactctgagactatcgaactcgcacctgaatacgctgaggctatcgcaacccgtgcaggtgcgctggctggcatctctccgatgttccaaccttgcgtagttcctcctaagccgtggactggcattactggtggtggctattgggctgcggggcgcaaacccctgcagttagtacgtactcgcagtctggcggcgcttcgccgctatgaagaagtgtcgatgccggaggtcatcaaagcagtcaacattgcgcagaatacagcatggcgtattaacaagaaagttctcgacgtagcgaataccatcacccaatggcagcactgtccagtcgcggatgtgcctgcgatggatcgtggcgaaatgccagctcgtccgttggacatcgataccaacgagattgcacttaaagcgtggaagaaagaagcttccgcgttctaccgcaaagacaaagcacgcgttagccgtcgtctgtcaatggagtttatgttatctcaggcgaacaagtttgcgaattatgaggcaatctggtttccgcaaaacatggattggcgtgggcgcgtgtacgctgtcccgatgttcaatcctcagggcaacgatatgacgaaaggcctgctgacctttgcgcaggagaaacccattggtgaagacggcttctattggctcaagattcatggcgcaaatacagctggagtggataaagtaccgtttccacaacgcatcaaatttgttgaggataaccatacgaatattatggaatgcgcgaaagcaccgctggaaaacacttggtgggcggaacaggactcgccgttctgttttctggcgttctgctttgagtatgctggcgtccaaaatagtggtctgtcgtacaactgtagcttgcctctggcatttgatggtagttgctccggcctgcaacatttctcagcgatgttacgcgacgaaattggcggcaaagctgtgaatctcctcccatctgcggaataccaggatatttatcgtatcgtcagcgacaaagttaacgagatgctgaaacaagatctgattaacggtacctctaccaccgtggaaacggtgactgataagaagacaggcgaaattacccaacgcacgaaatacgggaccaaagttatggcacagtggtggttagaacacggtgtgaatcgtggcgtcacgaaacgctcggttatgactttggtgtatgggagcaaagagtttggattccgcgatcaagtgctgagtgacaccattcaaccggcgatcgataacggcaaaggtgacatgtttctgaatccgaatcaggctgctggttacatggcgaaactgatctggaacgcagtgtccgggaccgtagtcgcagcagttgaggcgatgaactggctgaaaagtgcggcgaaattacttgctgctgaagtgaaggatcctaagacggatacagttctgcgtggccgctgcgcagtacattgggtgactcccgacggcttccctgtgtggcaggaatacaagaagcctattcagacgcgcttgaacctgatgttcctcggtcagttccgcttacagcctaccattaacaccaacaaagatagcgagattgatgcacacaaacaggagtctggtatcgctcctaactttgtacacagccaagacggtaaccaccttcgtatgactgtagtgtgggcacacgagaagtacggaatcgaatcttttgcactgattcacgactccttcggtaccattccggctgacgctgcgaacctgttcaaagcagtgcgcgaaactttcgttgacacatatgagtcttgtgatgtactggctgatttctacgaccagttcgctgaccagttgcacgagtctcaacgcgacaaaatgccagcacttccggctaaaggtaacttgaacctccgtgacatcttaaaatcggacttcgcgttcgcg

SEQ ID NO: 1344 - protein, 890 aa, synthetic construct
  REGION 1..890: note = Variant of RNA polymerase
MHHHHHHMNTINIAKNDFSDIELAAIPFNTLADHYGERLAREQLALEHESYEMGEARFRKMFERQLKAGEVADNAAAKPLITTLLPKMIARINDWFEEVKAKRGKRPTAFQFLQEIKPEAVAYITIKTTLACLTSADNTTVQAVASAIGRAIEDEARFGRIRDLEAKHFKKNVEEQLNKRVGHVYKKAFMQVVEHDMLSKGLLGGEAWSSWHKEDSIHVGVRCIEMLIESTGMVSLHRQNAGVVGQDSETIELAPEYAEAIATRAGALAGISPMFQPCVVPPKPWTGITGGGYWAAGRKPLQLVRTRSLAALRRYEEVSMPEVIKAVNIAQNTAWRINKKVLDVANTITQWQHCPVADVPAMDRGEMPARPLDIDTNEIALKAWKKEASAFYRKDKARVSRRLSMEFMLSQANKFANYEAIWFPQNMDWRGRVYAVPMFNPQGNDMTKGLLTFAQEKPIGEDGFYWLKIHGANTAGVDKVPFPQRIKFVEDNHTNIMECAKAPLENTWWAEQDSPFCFLAFCFEYAGVQNSGLSYNCSLPLAFDGSCSGLQHFSAMLRDEIGGKAVNLLPSAEYQDIYRIVSDKVNEMLKQDLINGTSTTVETVTDKKTGEITQRTKYGTKVMAQWWLEHGVNRGVTKRSVMTLVYGSKEFGFRDQVLSDTIQPAIDNGKGDMFLNPNQAAGYMAKLIWNAVSGTVVAAVEAMNWLKSAAKLLAAEVKDPKTDTVLRGRCAVHWVTPDGFPVWQEYKKPIQTRLNLMFLGQFRLQPTINTNKDSEIDAHKQESGIAPNFVHSQDGNHLRMTVVWAHEKYGIESFALIHDSFGTIPADAANLFKAVRETFVDTYESCDVLADFYDQFADQLHESQRDKMPALPAKGNLNLRDILKSDFAFA

SEQ ID NO: 1345 - DNA, 2670 bp, synthetic construct
  misc_feature 1..2670: note = Variant of RNA polymerase
  source 1..2670: mol_type = other DNA
atgcaccatcaccatcaccatatgaacacgattaacattgctaagaacgacttctctgacatcgaactggctgctatcccgttcaacactctggctgaccattacggtgagcgtttagctcgcgaacagttggcccttgagcatgagtcttacgagatgggtgaagcacgcttccgcaagatgtttgagcgtcaacttaaagctggtgaggttgcggataacgctgccgccaagcctctcatcactaccctactccctaagatgattgcacgcatcaacgactggtttgaggaagtgaaagctaagcgcggcaagcgcccgacagccttccagttcctgcaagaaatcaagccggaagccgtagcgtacatcaccattaagaccactctggcttgcctaaccagtgcggacaatacaaccgttcaggctgtagcaagcgcaatcggtcgggccattgaggacgaggctcgcttcggtcgtatccgtgaccttgaagctaagcacttcaagaagaacgttgaggaacaactcaacaagcgcgtagggcacgtctacaagaaagcatttatgcaagttgtcgagcacgacatgctctctaagggtctactcggtggcgaggcgtggtcttcgtggcataaggaagactctattcatgtaggagtacgcgctatcgagatgctcattgagtcaaccggaatggttagcttacaccgccaaaatgctggcgtagtaggtcaagactctgagactatcgaactcgcacctgaatacgctgaggctatcgcaacccgtgcaggtgcgctggctggcatctctccgatgttccaaccttgcgtagttcctcctaagccgtggactggcattactggtggtggctattgggctgcggggcgcaaacccctgcagttagtacgtactcgcagtctggcggcgcttcgccgctatgaagaagtgtcgatgccggaggtcatcaaagcagtcaacattgcgcagaatacagcatggcgtattaacaagaaagttctcgacgtagcgaataccatcacccaatggcagcactgtccagtcgcggatgtgcctgcgatggatcgtggcgaaatgccagctcgtccgttggacatcgataccaacgagattgcacttaaagcgtggaagaaagaagcttccgcgttctaccgcaaagacaaagcacgcgttagccgtcgtctgtcaatggagtttatgttatctcaggcgaacaagtttgcgaattatgaggcaatctggtttccgcaaaacatggattggcgtgggcgcgtgtacgctgtcccgatgttcaatcctcagggcaacgatatgacgaaaggcctgctgacctttgcgcaggagaaacccattggtgaagacggcttctattggctcaagattcatggcgcaaatacagctggagtggataaagtaccgtttccacaacgcatcaaatttgttgaggataaccatacgaatattatggaatgcgcgaaagcaccgctggaaaacacttggtgggcggaacaggactcgccgttctgttttctggcgttctgctttgagtatgctggcgtcatcaatagtggtctgtcgtacaactgtagcttgcctctggcatttgatggtagttgctccggcctgcaacatttctcagcgatgttacgcgacgaaattggcggcaaagctgtgaatctcctcccatctgcggaataccaggatatttatcgtatcgtcagcgacaaagttaacgagatgctgaaacaagatctgattaacggtacctctaccaccgtggaaacggtgactgataagaagacaggcgaaattacccaacgcacgaaatacgggaccaaagttatggcacagtggtggttagaacacggtgtgaatcgtggcgtcacgaaacgctcggttatgactttggtgtatgggagcaaagagtttggattccgcgatcaagtgctgagtgacaccattcaaccggcgatcgataacggcaaaggtgacatgtttctgaatccgaatcaggctgctggttacatggcgaaactgatctggaacgcagtgtccgggaccgtagtcgcagcagttgaggcgatgaactggctgaaaagtgcggcgaaattacttgctgctgaagtgaaggatcctaagacggatacagttctgcgtggccgctgcgcagtacattgggtgactcccgacggcttccctgtgtggcaggaatacaagaagcctattcagacgcgcttgaacctgatgttcctcggtcagttccgcttacagcctaccattaacaccaacaaagatagcgagattgatgcacacaaacaggagtctggtatcgctcctaactttgtacacagccaagacggtaaccaccttcgtatgactgtagtgtgggcacacgagaagtacggaatcgaatcttttgcactgattcacgactccttcggtaccattccggctgacgctgcgaacctgttcaaagcagtgcgcgaaactttcgttgacacatatgagtcttgtgatgtactggctgatttctacgaccagttcgctgaccagttgcacgagtctcaacgcgacaaaatgccagcacttccggctaaaggtaacttgaacctccgtgacatcttaaaatcggacttcgcgttcgcg

SEQ ID NO: 1346 - protein, 890 aa, synthetic construct
  REGION 1..890: note = Variant of RNA polymerase
MHHHHHHMNTINIAKNDFSDIELAAIPFNTLADHYGERLAREQLALEHESYEMGEARFRKMFERQLKAGEVADNAAAKPLITTLLPKMIARINDWFEEVKAKRGKRPTAFQFLQEIKPEAVAYITIKTTLACLTSADNTTVQAVASAIGRAIEDEARFGRIRDLEAKHFKKNVEEQLNKRVGHVYKKAFMQVVEHDMLSKGLLGGEAWSSWHKEDSIHVGVRAIEMLIESTGMVSLHRQNAGVVGQDSETIELAPEYAEAIATRAGALAGISPMFQPCVVPPKPWTGITGGGYWAAGRKPLQLVRTRSLAALRRYEEVSMPEVIKAVNIAQNTAWRINKKVLDVANTITQWQHCPVADVPAMDRGEMPARPLDIDTNEIALKAWKKEASAFYRKDKARVSRRLSMEFMLSQANKFANYEAIWFPQNMDWRGRVYAVPMFNPQGNDMTKGLLTFAQEKPIGEDGFYWLKIHGANTAGVDKVPFPQRIKFVEDNHTNIMECAKAPLENTWWAEQDSPFCFLAFCFEYAGVINSGLSYNCSLPLAFDGSCSGLQHFSAMLRDEIGGKAVNLLPSAEYQDIYRIVSDKVNEMLKQDLINGTSTTVETVTDKKTGEITQRTKYGTKVMAQWWLEHGVNRGVTKRSVMTLVYGSKEFGFRDQVLSDTIQPAIDNGKGDMFLNPNQAAGYMAKLIWNAVSGTVVAAVEAMNWLKSAAKLLAAEVKDPKTDTVLRGRCAVHWVTPDGFPVWQEYKKPIQTRLNLMFLGQFRLQPTINTNKDSEIDAHKQESGIAPNFVHSQDGNHLRMTVVWAHEKYGIESFALIHDSFGTIPADAANLFKAVRETFVDTYESCDVLADFYDQFADQLHESQRDKMPALPAKGNLNLRDILKSDFAFA

SEQ ID NO: 1347 - DNA, 2670 bp, synthetic construct
  misc_feature 1..2670: note = Variant of RNA polymerase
  source 1..2670: mol_type = other DNA
atgcaccatcaccatcaccatatgaacacgattaacattgctaagaacgacttctctgacatcgaactggctgctatcccgttcaacactctggctgaccattacggtgagcgtttagctcgcgaacagttggcccttgagcatgagtcttacgagatgggtgaagcacgcttccgcaagatgtttgagcgtcaacttaaagctggtgaggttgcggataacgctgccgccaagcctctcatcactaccctactccctaagatgattgcacgcatcaacgactggtttgaggaagtgaaagctaagcgcggcaagcgcccgacagccttccagttcctgcaagaaatcaagccggaagccgtagcgtacatcaccattaagaccactctggcttgcctaaccagtgcggacaatacaaccgttcaggctgtagcaagcgcaatcggtcgggccattgaggacgaggctcgcttcggtcgtatccgtgaccttgaagctaagcacttcaagaagaacgttgaggaacaactcaacaagcgcgtagggcacgtctacaagaaagcatttatgcaagttgtcgagcacgacatgctctctaagggtctactcggtggcgaggcgtggtcttcgtggcataaggaagactctattcatgtaggagtacgctgcatcgagatgctcattgagtcaaccggaatggttagcttacaccgccaaaatgctggcgtagtaggtcaagactctgagactatcgaactcgcacctgaatacgctgaggctatcgcaacccgtgcaggtgcgctggctggcatctctccgatgttccaaccttgcgtagttcctcctaagccgtggactggcattactggtggtggctattgggctgcggggcgcaaacccctgcagttagtacgtactcgcagtctggcggcgcttcgccgctatgaagaagtgtcgatgccggaggtcatcaaagcagtcaacattgcgcagaatacagcatggcgtattaacaagaaagttctcgacgtagcgaataccatcacccaatggcagcactgtccagtcgcggatgtgcctgcgatggatcgtggcgaaatgccagctcgtccgttggacatcgataccaacgaggaagcacttaaagcgtggaagaaagaagcttccgcgttctaccgcaaagacaaagcacgcgttagccgtcgtctgtcaatggagtttatgttatctcaggcgaacaagtttgcgaattatgaggcaatctggtttccgcaaaacatggattggcgtgggcgcgtgtacgctgtcccgatgttcaatcctcagggcaacgatatgacgaaaggcctgctgacctttgcgcaggagaaacccattggtgaagacggcttctattggctcaagattcatggcgcaaatacagctggagtggataaagtaccgtttccacaacgcatcaaatttgttgaggataaccatacgaatattatggaatgcgcgaaagcaccgctggaaaacacttggtgggcggaacaggactcgccgttctgttttctggcgttctgctttgagtatgctggcgtcatcaatagtggtctgtcgtacaactgtagcttgcctctggcatttgatggtagttgctccggcctgcaacatttctcagcgatgttacgcgacgaaattggcggcaaagctgtgaatctcctcccatctgcggaataccaggatatttatcgtatcgtcagcgacaaagttaacgagatgctgaaacaagatctgattaacggtacctctaccaccgtggaaacggtgactgataagaagacaggcgaaattacccaacgcacgaaatacgggaccaaagttatggcacagtggtggttagaacacggtgtgaatcgtggcgtcacgaaacgctcggttatgactttggtgtatgggagcaaagagtttggattccgcgatcaagtgctgagtgacaccattcaaccggcgatcgataacggcaaaggtgacatgtttctgaatccgaatcaggctgctggttacatggcgaaactgatctggaacgcagtgtccgggaccgtagtcgcagcagttgaggcgatgaactggctgaaaagtgcggcgaaattacttgctgctgaagtgaaggatcctaagacggatacagttctgcgtggccgctgcgcagtacattgggtgactcccgacggcttccctgtgtggcaggaatacaagaagcctattcagacgcgcttgaacctgatgttcctcggtcagttccgcttacagcctaccattaacaccaacaaagatagcgagattgatgcacacaaacaggagtctggtatcgctcctaactttgtacacagccaagacggtaaccaccttcgtatgactgtagtgtgggcacacgagaagtacggaatcgaatcttttgcactgattcacgactccttcggtaccattccggctgacgctgcgaacctgttcaaagcagtgcgcgaaactttcgttgacacatatgagtcttgtgatgtactggctgatttctacgaccagttcgctgaccagttgcacgagtctcaacgcgacaaaatgccagcacttccggctaaaggtaacttgaacctccgtgacatcttaaaatcggacttcgcgttcgcg

SEQ ID NO: 1348 - protein, 890 aa, synthetic construct
  REGION 1..890: note = Variant of RNA polymerase
MHHHHHHMNTINIAKNDFSDIELAAIPFNTLADHYGERLAREQLALEHESYEMGEARFRKMFERQLKAGEVADNAAAKPLITTLLPKMIARINDWFEEVKAKRGKRPTAFQFLQEIKPEAVAYITIKTTLACLTSADNTTVQAVASAIGRAIEDEARFGRIRDLEAKHFKKNVEEQLNKRVGHVYKKAFMQVVEHDMLSKGLLGGEAWSSWHKEDSIHVGVRCIEMLIESTGMVSLHRQNAGVVGQDSETIELAPEYAEAIATRAGALAGISPMFQPCVVPPKPWTGITGGGYWAAGRKPLQLVRTRSLAALRRYEEVSMPEVIKAVNIAQNTAWRINKKVLDVANTITQWQHCPVADVPAMDRGEMPARPLDIDTNEEALKAWKKEASAFYRKDKARVSRRLSMEFMLSQANKFANYEAIWFPQNMDWRGRVYAVPMFNPQGNDMTKGLLTFAQEKPIGEDGFYWLKIHGANTAGVDKVPFPQRIKFVEDNHTNIMECAKAPLENTWWAEQDSPFCFLAFCFEYAGVINSGLSYNCSLPLAFDGSCSGLQHFSAMLRDEIGGKAVNLLPSAEYQDIYRIVSDKVNEMLKQDLINGTSTTVETVTDKKTGEITQRTKYGTKVMAQWWLEHGVNRGVTKRSVMTLVYGSKEFGFRDQVLSDTIQPAIDNGKGDMFLNPNQAAGYMAKLIWNAVSGTVVAAVEAMNWLKSAAKLLAAEVKDPKTDTVLRGRCAVHWVTPDGFPVWQEYKKPIQTRLNLMFLGQFRLQPTINTNKDSEIDAHKQESGIAPNFVHSQDGNHLRMTVVWAHEKYGIESFALIHDSFGTIPADAANLFKAVRETFVDTYESCDVLADFYDQFADQLHESQRDKMPALPAKGNLNLRDILKSDFAFA

SEQ ID NO: 1349 - DNA, 2670 bp, synthetic construct
  misc_feature 1..2670: note = Variant of RNA polymerase
  source 1..2670: mol_type = other DNA
atgcaccatcaccatcaccatatgaacacgattaacattgctaagaacgacttctctgacatcgaactggctgctatcccgttcaacactctggctgaccattacggtgagcgtttagctcgcgaacagttggcccttgagcatgagtcttacgagatgggtgaagcacgcttccgcaagatgtttgagcgtcaacttaaagctggtgaggttgcggataacgctgccgccaagcctctcatcactaccctactccctaagatgattgcacgcatcaacgactggtttgaggaagtgaaagctaagcgcggcaagcgcccgacagccttccagttcctgcaagaaatcaagccggaagccgtagcgtacatcaccattaagaccactctggcttgcctaaccagtgcggacaatacaaccgttcaggctgtagcaagcgcaatcggtcgggccattgaggacgaggctcgcttcggtcgtatccgtgaccttgaagctaagcacttcaagaagaacgttgaggaacaactcaacaagcgcgtagggcacgtctacaagaaagcatttatgcaagttgtcgagcacgacatgctctctaagggtctactcggtggcgaggcgtggtcttcgtggcataaggaagactctattcatgtaggagtacgctgcatcgagatgctcattgagtcaaccggaatggttagcttacaccgccaaaatgctggcgtagtaggtcaagactctgagactatcgaactcgcacctgaatacgctgaggctatcgcaacccgtgcaggtgcgctggctggcatctctccgatgttccaaccttgcgtagttcctcctaagccgtggactggcattactggtggtggctattgggctgcggggcgcaaacccctgcagttagtacgtactcgcagtctggcggcgcttcgccgctatgaagaagtgtcgatgccggaggtcatcaaagcagtcaacattgcgcagaatacagcatggcgtattaacaagaaagttctcgacgtagcgaataccatcacccaatggcagcactgtccagtcgcggatgtgcctgcgatggatcgtggcgaaatgccagctcgtccgttggacatcgataccaacgagattgcacttaaagcgtggaagaaagaagcttccgcgttctaccgcaaagacaaagcacgcgttagccgtcgtctgtcaatggagtttatgttatctcaggcgaacaagtttgcgaattatgaggcaatctggtttccgcaaaacatggattggcgtgggcgcgtgtacgctgtcccgatgttcaatcctcagggcaacgatatgacgaaaggcctgctgacctttgcgcaggagaaacccattggtgaagacggcttctattggctcaagattcatggcgcaaatacagctggagtggataaagtaccgtttccacaacgcatcaaatttgttgaggataaccatacgaatattatggaatgcgcgaaagcaccgctggaaaacacttggtgggcggaacaggactcgccgttctgttttctggcgttctgctttgagtatgctggcgtcatcaatagtggtctgtcgtacaactgtagcttgcctctggcatttgatggtagttgctccggcctgcaacatttctcagcgatgttacgcgacgaaattggcggcaaagctgtgaatctcctcccatctgcgacgtaccaggatatttatcgtatcgtcagcgacaaagttaacgagatgctgaaacaagatctgattaacggtacctctaccaccgtggaaacggtgactgataagaagacaggcgaaattacccaacgcacgaaatacgggaccaaagttatggcacagtggtggttagaacacggtgtgaatcgtggcgtcacgaaacgctcggttatgactttggtgtatgggagcaaagagtttggattccgcgatcaagtgctgagtgacaccattcaaccggcgatcgataacggcaaaggtgacatgtttctgaatccgaatcaggctgctggttacatggcgaaactgatctggaacgcagtgtccgggaccgtagtcgcagcagttgaggcgatgaactggctgaaaagtgcggcgaaattacttgctgctgaagtgaaggatcctaagacggatacagttctgcgtggccgctgcgcagtacattgggtgactcccgacggcttccctgtgtggcaggaatacaagaagcctattcagacgcgcttgaacctgatgttcctcggtcagttccgcttacagcctaccattaacaccaacaaagatagcgagattgatgcacacaaacaggagtctggtatcgctcctaactttgtacacagccaagacggtaaccaccttcgtatgactgtagtgtgggcacacgagaagtacggaatcgaatcttttgcactgattcacgactccttcggtaccattccggctgacgctgcgaacctgttcaaagcagtgcgcgaaactttcgttgacacatatgagtcttgtgatgtactggctgatttctacgaccagttcgctgaccagttgcacgagtctcaacgcgacaaaatgccagcacttccggctaaaggtaacttgaacctccgtgacatcttaaaatcggacttcgcgttcgcg

SEQ ID NO: 1350 - protein, 890 aa, synthetic construct
  REGION 1..890: note = Variant of RNA polymerase
MHHHHHHMNTINIAKNDFSDIELAAIPFNTLADHYGERLAREQLALEHESYEMGEARFRKMFERQLKAGEVADNAAAKPLITTLLPKMIARINDWFEEVKAKRGKRPTAFQFLQEIKPEAVAYITIKTTLACLTSADNTTVQAVASAIGRAIEDEARFGRIRDLEAKHFKKNVEEQLNKRVGHVYKKAFMQVVEHDMLSKGLLGGEAWSSWHKEDSIHVGVRCIEMLIESTGMVSLHRQNAGVVGQDSETIELAPEYAEAIATRAGALAGISPMFQPCVVPPKPWTGITGGGYWAAGRKPLQLVRTRSLAALRRYEEVSMPEVIKAVNIAQNTAWRINKKVLDVANTITQWQHCPVADVPAMDRGEMPARPLDIDTNEIALKAWKKEASAFYRKDKARVSRRLSMEFMLSQANKFANYEAIWFPQNMDWRGRVYAVPMFNPQGNDMTKGLLTFAQEKPIGEDGFYWLKIHGANTAGVDKVPFPQRIKFVEDNHTNIMECAKAPLENTWWAEQDSPFCFLAFCFEYAGVINSGLSYNCSLPLAFDGSCSGLQHFSAMLRDEIGGKAVNLLPSATYQDIYRIVSDKVNEMLKQDLINGTSTTVETVTDKKTGEITQRTKYGTKVMAQWWLEHGVNRGVTKRSVMTLVYGSKEFGFRDQVLSDTIQPAIDNGKGDMFLNPNQAAGYMAKLIWNAVSGTVVAAVEAMNWLKSAAKLLAAEVKDPKTDTVLRGRCAVHWVTPDGFPVWQEYKKPIQTRLNLMFLGQFRLQPTINTNKDSEIDAHKQESGIAPNFVHSQDGNHLRMTVVWAHEKYGIESFALIHDSFGTIPADAANLFKAVRETFVDTYESCDVLADFYDQFADQLHESQRDKMPALPAKGNLNLRDILKSDFAFA

SEQ ID NO: 1351 - DNA, 2670 bp, synthetic construct
  misc_feature 1..2670: note = Variant of RNA polymerase
  source 1..2670: mol_type = other DNA
atgcaccatcaccatcaccatatgaacacgattaacattgctaagaacgacttctctgacatcgaactggctgctatcccgttcaacactctggctgaccattacggtgagcgtttagctcgcgaacagttggcccttgagcatgagtcttacgagatgggtgaagcacgcttccgcaagatgtttgagcgtcaacttaaagctggtgaggttgcggataacgctgccgccaagcctctcatcactaccctactccctaagatgattgcacgcatcaacgactggtttgaggaagtgaaagctaagcgcggcaagcgcccgacagccttccagttcctgcaagaaatcaagccggaagccgtagcgtacatcaccattaagaccactctggcttgcctaaccagtgcggacaatacaaccgttcaggctgtagcaagcgcaatcggtcgggccattgaggacgaggctcgcttcggtcgtatccgtgaccttgaagctaagcacttcaagaagaacgttgaggaacaactcaacaagcgcgtagggcacgtctacaagaaagcatttatgcaagttgtcgagcacgacatgctctctaagggtctactcggtggcgaggcgtggtcttcgtggcataaggaagactctattcatgtaggagtacgctgcatcgagatgctcattgagtcaaccggaatggttagcttacaccgccaaaatgctggcgtagtaggtcaagactctgagactatcgaactcgcacctgaatacgctgaggctatcgcaacccgtgcaggtgcgctggctggcatctctccgatgttccaaccttgcgtagttcctcctaagccgtggactggcattactggtggtggctattgggctgcggggcgcaaacccctgcagttagtacgtactcgcagtctggcggcgcttcgccgctatgaagaagtgtcgatgccggaggtcatcaaagcagtcaacattgcgcagaatacagcatggaaaattaacaagaaagttctcgacgtagcgaataccatcacccaatggcagcactgtccagtcgcggatgtgcctgcgatggatcgtggcgaaatgccagctcgtccgttggacatcgataccaacgagattgcacttaaagcgtggaagaaagaagcttccgcgttctaccgcaaagacaaagcacgcgttagccgtcgtctgtcaatggagtttatgttatctcaggcgaacaagtttgcgaattatgaggcaatctggtttccgcaaaacatggattggcgtgggcgcgtgtacgctgtcccgatgttcaatcctcagggcaacgatatgacgaaaggcctgctgacctttgcgcaggagaaacccattggtgaagacggcttctattggctcaagattcatggcgcaaatacagctggagtggataaagtaccgtttccacaacgcatcaaatttgttgaggataaccatacgaatattatggaatgcgcgaaagcaccgctggaaaacacttggtgggcggaacaggactcgccgttctgttttctggcgttctgctttgagtatgctggcgtcatcaatagtggtctgtcgtacaactgtagcttgcctctggcatttgatggtagttgctccggcctgcaacatttctcagcgatgttacgcgacgaaattggcggcaaagctgtgaatctcctcccatctgcggaataccaggatatttatcgtatcgtcagcgacaaagttaacgagatgctgaaacaagatctgattaacggtacctctaccaccgtggaaacggtgactgataagaagacaggcgaaattacccaacgcacgaaatacgggaccaaagttatggcacagtggtggttagaacacggtgtgaatcgtggcgtcacgaaacgctcggttatgactttggtgtatgggagcaaagagtttggattccgcgatcaagtgctgagtgacaccattcaaccggcgatcgataacggcaaaggtgacatgtttctgaatccgaatcaggctgctggttacatggcgaaactgatctggaacgcagtgtccgggaccgtagtcgcagcagttgaggcgatgaactggctgaaaagtgcggcgaaattacttgctgctgaagtgaaggatcctaagacggatacagttctgcgtggccgctgcgcagtacattgggtgactcccgacggcttccctgtgtggcaggaatacaagaagcctattcagacgcgcttgaacctgatgttcctcggtcagttccgcttacagcctaccattaacaccaacaaagatagcgagattgatgcacacaaacaggagtctggtatcgctcctaactttgtacacagccaagacggtaaccaccttcgtatgactgtagtgtgggcacacgagaagtacggaatcgaatcttttgcactgattcacgactccttcggtaccattccggctgacgctgcgaacctgttcaaagcagtgcgcgaaactttcgttgacacatatgagtcttgtgatgtactggctgatttctacgaccagttcgctgaccagttgcacgagtctcaacgcgacaaaatgccagcacttccggctaaaggtaacttgaacctccgtgacatcttaaaatcggacttcgcgttcgcg

SEQ ID NO: 1352 - protein, 890 aa, synthetic construct
  REGION 1..890: note = Variant of RNA polymerase
MHHHHHHMNTINIAKNDFSDIELAAIPFNTLADHYGERLAREQLALEHESYEMGEARFRKMFERQLKAGEVADNAAAKPLITTLLPKMIARINDWFEEVKAKRGKRPTAFQFLQEIKPEAVAYITIKTTLACLTSADNTTVQAVASAIGRAIEDEARFGRIRDLEAKHFKKNVEEQLNKRVGHVYKKAFMQVVEHDMLSKGLLGGEAWSSWHKEDSIHVGVRCIEMLIESTGMVSLHRQNAGVVGQDSETIELAPEYAEAIATRAGALAGISPMFQPCVVPPKPWTGITGGGYWAAGRKPLQLVRTRSLAALRRYEEVSMPEVIKAVNIAQNTAWKINKKVLDVANTITQWQHCPVADVPAMDRGEMPARPLDIDTNEIALKAWKKEASAFYRKDKARVSRRLSMEFMLSQANKFANYEAIWFPQNMDWRGRVYAVPMFNPQGNDMTKGLLTFAQEKPIGEDGFYWLKIHGANTAGVDKVPFPQRIKFVEDNHTNIMECAKAPLENTWWAEQDSPFCFLAFCFEYAGVINSGLSYNCSLPLAFDGSCSGLQHFSAMLRDEIGGKAVNLLPSAEYQDIYRIVSDKVNEMLKQDLINGTSTTVETVTDKKTGEITQRTKYGTKVMAQWWLEHGVNRGVTKRSVMTLVYGSKEFGFRDQVLSDTIQPAIDNGKGDMFLNPNQAAGYMAKLIWNAVSGTVVAAVEAMNWLKSAAKLLAAEVKDPKTDTVLRGRCAVHWVTPDGFPVWQEYKKPIQTRLNLMFLGQFRLQPTINTNKDSEIDAHKQESGIAPNFVHSQDGNHLRMTVVWAHEKYGIESFALIHDSFGTIPADAANLFKAVRETFVDTYESCDVLADFYDQFADQLHESQRDKMPALPAKGNLNLRDILKSDFAFA

SEQ ID NO: 1353 - DNA, 2670 bp, synthetic construct
  misc_feature 1..2670: note = Variant of RNA polymerase
  source 1..2670: mol_type = other DNA
atgcaccatcaccatcaccatatgaacacgattaacattgctaagaacgacttctctgacatcgaactggctgctatcccgttcaacactctggctgaccattacggtgagcgtttagctcgcgaacagttggcccttgagcatgagtcttacgagatgggtgaagcacgcttccgcaagatgtttgagcgtcaacttaaagctggtgaggttgcggataacgctgccgccaagcctctcatcactaccctactccctaagatgattgcacgcatcaacgactggtttgaggaagtgaaagctaagcgcggcaagcgcccgacagccttccagttcctgcaagaaatcaagccggaagccgtagcgtacatcaccattaagaccactctggcttgcctaaccagtgcggacaatacaaccgttcaggctgtagcaagcgcaatcggtcgggccattgaggacgaggctcgcttcggtcgtatccgtgaccttgaagctaagcacttcaagaagaacgttgaggaacaactcaacaagcgcgtagggcacgtctacaagaaagcatttatgcaagttgtcgagcacgacatgctctctaagggtctactcggtggcgaggcgtggtcttcgtggcataaggaagactctattcatgtaggagtacgctgcatcgagatgctcattgagtcaaccggaatggttagcttacaccgccaaaatgctggcgtagtaggtcaagactctgagactatcgaactcgcacctgaatacgctgaggctatcgcaacccgtgcaggtgcgctggctggcatctctccgatgttccaaccttgcgtagttcctcctaagccgtggactggcattactggtggtggctattgggctgcggggcgcaaacccctgcagttagtacgtactcgcagtctggcggcgcttcgccgctatgaagaagtgtcgatgccggaggtcatcaaagcagtcaacattgcgcagaatacagcatggcgtattaacaagaaagttctcgacgtagcgaataccatcacccaatggcagcactgtccagtcgcggatgtgcctgcgatggatcgtggcgaaatgccagctcgtccgttggacatcgataccaacgagattgcacttaaagcgtggaagaaagaagcttccgcgttctaccgcaaagacaaagcacgcgttagccgtcgtctgtcaatggagtttatgttatctcaggcgaacaagtttgcgaattatgaggcaatctggtttccgcaaaacatggattggcgtgggcgcgtgtacgctgtcccgatgttcaatcctcagggcaacgatatgacgaaaggcctgctgacctttgcgcaggagaaacccattggtgaagacggcttctattggctcaagattcatggcgcaaatacagctggagtggataaagtaccgtttccagagcgcatcaaatttgttgaggataaccatacgaatattatggaatgcgcgaaagcaccgctggaaaacacttggtgggcggaacaggactcgccgttctgttttctggcgttctgctttgagtatgctggcgtcatcaatagtggtctgtcgtacaactgtagcttgcctctggcatttgatggtagttgctccggcctgcaacatttctcagcgatgttacgcgacgaaattggcggcaaagctgtgaatctcctcccatctgcggaataccaggatatttatcgtatcgtcagcgacaaagttaacgagatgctgaaacaagatctgattaacggtacctctaccaccgtggaaacggtgactgataagaagacaggcgaaattacccaacgcacgaaatacgggaccaaagttatggcacagtggtggttagaacacggtgtgaatcgtggcgtcacgaaacgctcggttatgactttggtgtatgggagcaaagagtttggattccgcgatcaagtgctgagtgacaccattcaaccggcgatcgataacggcaaaggtgacatgtttctgaatccgaatcaggctgctggttacatggcgaaactgatctggaacgcagtgtccgggaccgtagtcgcagcagttgaggcgatgaactggctgaaaagtgcggcgaaattacttgctgctgaagtgaaggatcctaagacggatacagttctgcgtggccgctgcgcagtacattgggtgactcccgacggcttccctgtgtggcaggaatacaagaagcctattcagacgcgcttgaacctgatgttcctcggtcagttccgcttacagcctaccattaacaccaacaaagatagcgagattgatgcacacaaacaggagtctggtatcgctcctaactttgtacacagccaagacggtaaccaccttcgtatgactgtagtgtgggcacacgagaagtacggaatcgaatcttttgcactgattcacgactccttcggtaccattccggctgacgctgcgaacctgttcaaagcagtgcgcgaaactttcgttgacacatatgagtcttgtgatgtactggctgatttctacgaccagttcgctgaccagttgcacgagtctcaacgcgacaaaatgccagcacttccggctaaaggtaacttgaacctccgtgacatcttaaaatcggacttcgcgttcgcg

SEQ ID NO: 1354 - protein, 890 aa, synthetic construct
  REGION 1..890: note = Variant of RNA polymerase
MHHHHHHMNTINIAKNDFSDIELAAIPFNTLADHYGERLAREQLALEHESYEMGEARFRKMFERQLKAGEVADNAAAKPLITTLLPKMIARINDWFEEVKAKRGKRPTAFQFLQEIKPEAVAYITIKTTLACLTSADNTTVQAVASAIGRAIEDEARFGRIRDLEAKHFKKNVEEQLNKRVGHVYKKAFMQVVEHDMLSKGLLGGEAWSSWHKEDSIHVGVRCIEMLIESTGMVSLHRQNAGVVGQDSETIELAPEYAEAIATRAGALAGISPMFQPCVVPPKPWTGITGGGYWAAGRKPLQLVRTRSLAALRRYEEVSMPEVIKAVNIAQNTAWRINKKVLDVANTITQWQHCPVADVPAMDRGEMPARPLDIDTNEIALKAWKKEASAFYRKDKARVSRRLSMEFMLSQANKFANYEAIWFPQNMDWRGRVYAVPMFNPQGNDMTKGLLTFAQEKPIGEDGFYWLKIHGANTAGVDKVPFPERIKFVEDNHTNIMECAKAPLENTWWAEQDSPFCFLAFCFEYAGVINSGLSYNCSLPLAFDGSCSGLQHFSAMLRDEIGGKAVNLLPSAEYQDIYRIVSDKVNEMLKQDLINGTSTTVETVTDKKTGEITQRTKYGTKVMAQWWLEHGVNRGVTKRSVMTLVYGSKEFGFRDQVLSDTIQPAIDNGKGDMFLNPNQAAGYMAKLIWNAVSGTVVAAVEAMNWLKSAAKLLAAEVKDPKTDTVLRGRCAVHWVTPDGFPVWQEYKKPIQTRLNLMFLGQFRLQPTINTNKDSEIDAHKQESGIAPNFVHSQDGNHLRMTVVWAHEKYGIESFALIHDSFGTIPADAANLFKAVRETFVDTYESCDVLADFYDQFADQLHESQRDKMPALPAKGNLNLRDILKSDFAFA

SEQ ID NO: 1355 - DNA, 2670 bp, synthetic construct
  misc_feature 1..2670: note = Variant of RNA polymerase
  source 1..2670: mol_type = other DNA
atgcaccatcaccatcaccatatgaacacgattaacattgctaagaacgacttctctgacatcgaactggctgctatcccgttcaacactctggctgaccattacggtgagcgtttagctcgcgaacagttggcccttgagcatgagtcttacgagatgggtgaagcacgcttccgcaagatgtttgagcgtcaacttaaagctggtgaggttgcggataacgctgccgccaagcctctcatcactaccctactccctaagatgattgcacgcatcaacgactggtttgaggaagtgaaagctaagcgcggcaagcgcccgacagccttccagttcctgcaagaaatcaagccggaagccgtagcgtacatcaccattaagaccactctggcttgcctaaccagtgcggacaatacaaccgttcaggctgtagcaagcgcaatcggtcgggccattgaggacgaggctcgcttcggtcgtatccgtgaccttgaagctaagcacttcaagaagaacgttgaggaacaactcaacaagcgcgtagggcacgtctacaagaaagcatttatgcaagttgtcgagcacgacatgctctctaagggtctactcggtggcgaggcgtggtcttcgtggcataaggaagactctattcatgtaggagtacgctgcatcgagatgctcattgagtcaaccggaatggttagcttacaccgccaaaatgctggcgtagtaggtcaagactctgagactatcgaactcgcacctgaatacgctgaggctatcgcaacccgtgcaggtgcgctggctggcatctctccgatgttccaaccttgcgtagttcctcctaagccgtggactggcattactggtggtggctattgggctgcggggcgcaaacccctgcagttagtacgtactcgcagtctggcggcgcttcgccgctatgaagaagtgtcgatgccggaggtcatcaaagcagtcaacattgcgcagaatacagcatggcgtattaacaagaaagttctcgacgtagcgaataccatcacccaatggcagcactgtccagtcgcggatgtgcctgcgatggatcgtggcgaaatgccagctcgtccgttggacatcgataccaacgagattgcacttaaagcgtggaagaaagaagcttccgcgttctaccgcaaagacaaagcacgcgttagccgtcgtctgtcaatggagtttatgttatctcaggcgaacaagtttgcgaattatgaggcaatctggtttccgcaaaacatggattggcgtgggcgcgtgtacgctgtcccgatgttcaatcctcagggcaacgatatgacgaaaggcctgctgacctttgcgcaggagaaacccattggtgaagacggcttctattggctcaagattcatggcgcaaatacagctggagtggataaagtaccgtttccacaacgcatcaaatttgttgaggataaccatacgaatattatggaatgcgcgaaagcaccgctggaaaacacttggtgggcggaacaggactcgccgttctgttttctggcgttctgctttgagtatgctggcgtcatcaatagtggtctgtcgtacaactgtagcttgcctctggcatttgatggtagttgctccggcctgcaacatttctcagcgatgttacgcgacgaaattggcggcaaagctgtgaatctcctcccatctgcggaataccaggatatttatcgtatcgtcagcgacaaagttaacgagatgctgaaacaagatctgattaacggtacctctaccaccgtggaaacggtgactgataagaagacaggcgaaattacccaacgcacgaaatacgggaccaaagttatggcacagtggtggttagaacacggtgtgaatcgtggcgtcacgaaacgctcggttatgactttggtgtatgggagcaaagagtttggattccgcgatcaagtgctgagtgacaccattcaaccggcgatcgataacggcaaaggtctgatgtttctgaatccgaatcaggctgctggttacatggcgaaactgatctggaacgcagtgtccgggaccgtagtcgcagcagttgaggcgatgaactggctgaaaagtgcggcgaaattacttgctgctgaagtgaaggatcctaagacggatacagttctgcgtggccgctgcgcagtacattgggtgactcccgacggcttccctgtgtggcaggaatacaagaagcctattcagacgcgcttgaacctgatgttcctcggtcagttccgcttacagcctaccattaacaccaacaaagatagcgagattgatgcacacaaacaggagtctggtatcgctcctaactttgtacacagccaagacggtaaccaccttcgtatgactgtagtgtgggcacacgagaagtacggaatcgaatcttttgcactgattcacgactccttcggtaccattccggctgacgctgcgaacctgttcaaagcagtgcgcgaaactttcgttgacacatatgagtcttgtgatgtactggctgatttctacgaccagttcgctgaccagttgcacgagtctcaacgcgacaaaatgccagcacttccggctaaaggtaacttgaacctccgtgacatcttaaaatcggacttcgcgttcgcg

SEQ ID NO: 1356 - protein, 890 aa, synthetic construct
  REGION 1..890: note = Variant of RNA polymerase
MHHHHHHMNTINIAKNDFSDIELAAIPFNTLADHYGERLAREQLALEHESYEMGEARFRKMFERQLKAGEVADNAAAKPLITTLLPKMIARINDWFEEVKAKRGKRPTAFQFLQEIKPEAVAYITIKTTLACLTSADNTTVQAVASAIGRAIEDEARFGRIRDLEAKHFKKNVEEQLNKRVGHVYKKAFMQVVEHDMLSKGLLGGEAWSSWHKEDSIHVGVRCIEMLIESTGMVSLHRQNAGVVGQDSETIELAPEYAEAIATRAGALAGISPMFQPCVVPPKPWTGITGGGYWAAGRKPLQLVRTRSLAALRRYEEVSMPEVIKAVNIAQNTAWRINKKVLDVANTITQWQHCPVADVPAMDRGEMPARPLDIDTNEIALKAWKKEASAFYRKDKARVSRRLSMEFMLSQANKFANYEAIWFPQNMDWRGRVYAVPMFNPQGNDMTKGLLTFAQEKPIGEDGFYWLKIHGANTAGVDKVPFPQRIKFVEDNHTNIMECAKAPLENTWWAEQDSPFCFLAFCFEYAGVINSGLSYNCSLPLAFDGSCSGLQHFSAMLRDEIGGKAVNLLPSAEYQDIYRIVSDKVNEMLKQDLINGTSTTVETVTDKKTGEITQRTKYGTKVMAQWWLEHGVNRGVTKRSVMTLVYGSKEFGFRDQVLSDTIQPAIDNGKGLMFLNPNQAAGYMAKLIWNAVSGTVVAAVEAMNWLKSAAKLLAAEVKDPKTDTVLRGRCAVHWVTPDGFPVWQEYKKPIQTRLNLMFLGQFRLQPTINTNKDSEIDAHKQESGIAPNFVHSQDGNHLRMTVVWAHEKYGIESFALIHDSFGTIPADAANLFKAVRETFVDTYESCDVLADFYDQFADQLHESQRDKMPALPAKGNLNLRDILKSDFAFA

SEQ ID NO: 1357 - DNA, 2670 bp, synthetic construct
  misc_feature 1..2670: note = Variant of RNA polymerase
  source 1..2670: mol_type = other DNA
atgcaccatcaccatcaccatatgaacacgattaacattgctaagaacgacttctctgacatcgaactggctgctatcccgttcaacactctggctgaccattacggtgagcgtttagctcgcgaacagttggcccttgagcatgagtcttacgagatgggtgaagcacgcttccgcaagatgtttgagcgtcaacttaaagctggtgaggttgcggataacgctgccgccaagcctctcatcactaccctactccctaagatgattgcacgcatcaacgactggtttgaggaagtgaaagctaagcgcggcaagcgcccgacagccttccagttcctgcaagaaatcaagccggaagccgtagcgtacatcaccattaagaccactctggcttgcctaaccagtgcggacaatacaaccgttcaggctgtagcaagcgcaatcggtcgggccattgaggacgaggctcgcttcggtcgtatccgtgaccttgaagctaagcacttcaagaagaacgttgaggaacaactcaacaagcgcgtagggcacgtctacaagaaagcatttatgcaagttgtcgagcacgacatgctctctaagggtctactcggtggcgaggcgtggtcttcgtggcataaggaagactctattcatgtaggagtacgctgcatcgagatgctcattgagtcaaccggaatggttagcttacaccgccaaaatgctggcgtagtaggtcaagactctgagactatcgaactcgcacctgaatacgctgaggctatcgcaacccgtgcaggtgcgctggctggcatctctccgatgttccaaccttgcgtagttcctcctaagccgtggactggcattactggtggtggctattgggctgcggggcgcaaacccctgcagttagtacgtactcgcagtctggcggcgcttcgccgctatgaagaagtgtcgatgccggaggtcatcaaagcagtcaacattgcgcagaatacagcatggcgtattaacaagaaagttctcgacgtagcgaataccatcacccaatggcagcactgtccagtcgcggatgtgcctgcgatggatcgtggcgaaatgccagctcgtccgttggacatcgataccaacgagattgcacttaaagcgtggaagcgcgaagcttccgcgttctaccgcaaagacaaagcacgcgttagccgtcgtctgtcaatggagtttatgttatctcaggcgaacaagtttgcgaattatgaggcaatctggtttccgcaaaacatggattggcgtgggcgcgtgtacgctgtcccgatgttcaatcctcagggcaacgatatgacgaaaggcctgctgacctttgcgcaggagaaacccattggtgaagacggcttctattggctcaagattcatggcgcaaatacagctggagtggataaagtaccgtttccacaacgcatcaaatttgttgaggataaccatacgaatattatggaatgcgcgaaagcaccgctggaaaacacttggtgggcggaacaggactcgccgttctgttttctggcgttctgctttgagtatgctggcgtcatcaatagtggtctgtcgtacaactgtagcttgcctctggcatttgatggtagttgctccggcctgcaacatttctcagcgatgttacgcgacgaaattggcggcaaagctgtgaatctcctcccatctgcggaataccaggatatttatcgtatcgtcagcgacaaagttaacgagatgctgaaacaagatctgattaacggtacctctaccaccgtggaaacggtgactgataagaagacaggcgaaattacccaacgcacgaaatacgggaccaaagttatggcacagtggtggttagaacacggtgtgaatcgtggcgtcacgaaacgctcggttatgactttggtgtatgggagcaaagagtttggattccgcgatcaagtgctgagtgacaccattcaaccggcgatcgataacggcaaaggtgacatgtttctgaatccgaatcaggctgctggttacatggcgaaactgatctggaacgcagtgtccgggaccgtagtcgcagcagttgaggcgatgaactggctgaaaagtgcggcgaaattacttgctgctgaagtgaaggatcctaagacggatacagttctgcgtggccgctgcgcagtacattgggtgactcccgacggcttccctgtgtggcaggaatacaagaagcctattcagacgcgcttgaacctgatgttcctcggtcagttccgcttacagcctaccattaacaccaacaaagatagcgagattgatgcacacaaacaggagtctggtatcgctcctaactttgtacacagccaagacggtaaccaccttcgtatgactgtagtgtgggcacacgagaagtacggaatcgaatcttttgcactgattcacgactccttcggtaccattccggctgacgctgcgaacctgttcaaagcagtgcgcgaaactttcgttgacacatatgagtcttgtgatgtactggctgatttctacgaccagttcgctgaccagttgcacgagtctcaacgcgacaaaatgccagcacttccggctaaaggtaacttgaacctccgtgacatcttaaaatcggacttcgcgttcgcg

SEQ ID NO: 1358 - protein, 890 aa, synthetic construct
  REGION 1..890: note = Variant of RNA polymerase
MHHHHHHMNTINIAKNDFSDIELAAIPFNTLADHYGERLAREQLALEHESYEMGEARFRKMFERQLKAGEVADNAAAKPLITTLLPKMIARINDWFEEVKAKRGKRPTAFQFLQEIKPEAVAYITIKTTLACLTSADNTTVQAVASAIGRAIEDEARFGRIRDLEAKHFKKNVEEQLNKRVGHVYKKAFMQVVEHDMLSKGLLGGEAWSSWHKEDSIHVGVRCIEMLIESTGMVSLHRQNAGVVGQDSETIELAPEYAEAIATRAGALAGISPMFQPCVVPPKPWTGITGGGYWAAGRKPLQLVRTRSLAALRRYEEVSMPEVIKAVNIAQNTAWRINKKVLDVANTITQWQHCPVADVPAMDRGEMPARPLDIDTNEIALKAWKREASAFYRKDKARVSRRLSMEFMLSQANKFANYEAIWFPQNMDWRGRVYAVPMFNPQGNDMTKGLLTFAQEKPIGEDGFYWLKIHGANTAGVDKVPFPQRIKFVEDNHTNIMECAKAPLENTWWAEQDSPFCFLAFCFEYAGVINSGLSYNCSLPLAFDGSCSGLQHFSAMLRDEIGGKAVNLLPSAEYQDIYRIVSDKVNEMLKQDLINGTSTTVETVTDKKTGEITQRTKYGTKVMAQWWLEHGVNRGVTKRSVMTLVYGSKEFGFRDQVLSDTIQPAIDNGKGDMFLNPNQAAGYMAKLIWNAVSGTVVAAVEAMNWLKSAAKLLAAEVKDPKTDTVLRGRCAVHWVTPDGFPVWQEYKKPIQTRLNLMFLGQFRLQPTINTNKDSEIDAHKQESGIAPNFVHSQDGNHLRMTVVWAHEKYGIESFALIHDSFGTIPADAANLFKAVRETFVDTYESCDVLADFYDQFADQLHESQRDKMPALPAKGNLNLRDILKSDFAFA

SEQ ID NO: 1359 - DNA, 2670 bp, synthetic construct
  misc_feature 1..2670: note = Variant of RNA polymerase
  source 1..2670: mol_type = other DNA
atgcaccatcaccatcaccatatgaacacgattaacattgctaagaacgacttctctgacatcgaactggctgctatcccgttcaacactctggctgaccattacggtgagcgtttagctcgcgaacagttggcccttgagcatgagtcttacgagatgggtgaagcacgcttccgcaagatgtttgagcgtcaacttaaagctggtgaggttgcggataacgctgccgccaagcctctcatcactaccctactccctaagatgattgcacgcatcaacgactggtttgaggaagtgaaagctaagcgcggcaagcgcccgacagccttccagttcctgcaagaaatcaagccggaagccgtagcgtacatcaccattaagaccactctggcttgcctaaccagtgcggacaatacaaccgttcaggctgtagcaagcgcaatcggtcgggccattgaggacgaggctcgcttcggtcgtatccgtgaccttgaagctaagcacttcaagaagaacgttgaggaacaactcaacaagcgcgtagggcacgtctacaagaaagcatttatgcaagttgtcgagcacgacatgctctctaagggtctactcggtggcgaggcgtggtcttcgtggcataaggaagactctattcatgtaggagtacgctgcatcgagatgctcattgagtcaaccggaatggttagcttacaccgccaaaatgctggcgtagtaggtcaagactctgagactatcgaactcgcacctgaatacgctgaggctatcgcaacccgtgcaggtgcgctggctggcatctctccgatgttccaaccttgcgtagttcctcctaagccgtggactggcattactggtggtggctattgggctgcggggcgcaaacccctgcagttagtacgtactcgcagtctggcggcgcttcgccgctatgaagaagtgtcgatgccggaggtcatcaaagcagtcaacattgcgcagaatacagcatggcgtattaacaagaaagttctcgacgtagcgaataccatcacccaatggcagcactgtccagtcgcggatgtgcctgcgatggatcgtggcgaaatgccagctcgtccgttggacatcgataccaacgagattgcacttaaagcgtggaagaaagaagcttccgcgttctaccgcaaagacaaagcacgcgttagccgtcgtctgtcaatggagtttatgttatctcaggcgaacaagtttgcgaattatgaggcaatctggtttccgcaaaacatggattggcgtgggcgcgtgtacgctgtcccgatgttcaatcctcagggcaacgatatgacgaaaggcctgctgacctttgcgcaggagaaacccattggtgaagacggcttctattggctcaagattcatggcgcaaatacagctggagtggataaagtaccgtttccacaacgcatcaaatttgttgaggataaccatacgaatattatggaatgcgcgaaagcaccgctggaaaacacttggtgggcggaacaggactcgccgttctgttttctggcgttctgctttgagtatgctggcgtcatcaatagtggtctgtcgtacaactgtagcttgcctctggcatttgatggtagttgctccggcctgcaacatttctcagcgatgttacgcgacgaaattggcggcaaagctgtgaatctcctcccatctgcggaataccaggatatttatcgtatcgtcagcgacaaagttaacgagatgctgaaacaagatctgattaacggtacctctaccaccgtggaaacggtgactgataagaagacaggcgaaattacccaacgcacgaaatacgggaccaaagttatggcacagtggtggttagaacacggtgtgaatcgtggcgtcacgaaacgctcggttatgactttggtgtatgggagcaaagagtttggattccgcgatcaagtgctgagtgacaccattcaaccggcgatcgataacggcaaaggtgacatgtttctgaatccgaatcaggctgctggttacatggcgaaactgatctggaacgcagtgtccgggaccgtagtcgcagcagttgaggcgatgaactggctgaaaagtgcggcgaaattacttgctgctgaagtgaaggatcctaagacggatacaattctgcgtggccgctgcgcagtacattgggtgactcccgacggcttccctgtgtggcaggaatacaagaagcctattcagacgcgcttgaacctgatgttcctcggtcagttccgcttacagcctaccattaacaccaacaaagatagcgagattgatgcacacaaacaggagtctggtatcgctcctaactttgtacacagccaagacggtaaccaccttcgtatgactgtagtgtgggcacacgagaagtacggaatcgaatcttttgcactgattcacgactccttcggtaccattccggctgacgctgcgaacctgttcaaagcagtgcgcgaaactttcgttgacacatatgagtcttgtgatgtactggctgatttctacgaccagttcgctgaccagttgcacgagtctcaacgcgacaaaatgccagcacttccggctaaaggtaacttgaacctccgtgacatcttaaaatcggacttcgcgttcgcg

SEQ ID NO: 1360 - protein, 890 aa, synthetic construct
  REGION 1..890: note = Variant of RNA polymerase
MHHHHHHMNTINIAKNDFSDIELAAIPFNTLADHYGERLAREQLALEHESYEMGEARFRKMFERQLKAGEVADNAAAKPLITTLLPKMIARINDWFEEVKAKRGKRPTAFQFLQEIKPEAVAYITIKTTLACLTSADNTTVQAVASAIGRAIEDEARFGRIRDLEAKHFKKNVEEQLNKRVGHVYKKAFMQVVEHDMLSKGLLGGEAWSSWHKEDSIHVGVRCIEMLIESTGMVSLHRQNAGVVGQDSETIELAPEYAEAIATRAGALAGISPMFQPCVVPPKPWTGITGGGYWAAGRKPLQLVRTRSLAALRRYEEVSMPEVIKAVNIAQNTAWRINKKVLDVANTITQWQHCPVADVPAMDRGEMPARPLDIDTNEIALKAWKKEASAFYRKDKARVSRRLSMEFMLSQANKFANYEAIWFPQNMDWRGRVYAVPMFNPQGNDMTKGLLTFAQEKPIGEDGFYWLKIHGANTAGVDKVPFPQRIKFVEDNHTNIMECAKAPLENTWWAEQDSPFCFLAFCFEYAGVINSGLSYNCSLPLAFDGSCSGLQHFSAMLRDEIGGKAVNLLPSAEYQDIYRIVSDKVNEMLKQDLINGTSTTVETVTDKKTGEITQRTKYGTKVMAQWWLEHGVNRGVTKRSVMTLVYGSKEFGFRDQVLSDTIQPAIDNGKGDMFLNPNQAAGYMAKLIWNAVSGTVVAAVEAMNWLKSAAKLLAAEVKDPKTDTILRGRCAVHWVTPDGFPVWQEYKKPIQTRLNLMFLGQFRLQPTINTNKDSEIDAHKQESGIAPNFVHSQDGNHLRMTVVWAHEKYGIESFALIHDSFGTIPADAANLFKAVRETFVDTYESCDVLADFYDQFADQLHESQRDKMPALPAKGNLNLRDILKSDFAFA

SEQ ID NO: 1361 - DNA, 2670 bp, synthetic construct
  misc_feature 1..2670: note = Variant of RNA polymerase
  source 1..2670: mol_type = other DNA
atgcaccatcaccatcaccatatgaacacgattaacattgctaagaacgacttctctgacatcgaactggctgctatcccgttcaacactctggctgaccattacggtgagcgtttagctcgcgaacagttggcccttgagcatgagtcttacgagatgggtgaagcacgcttccgcaagatgtttgagcgtcaacttaaagctggtgaggttgcggataacgctgccgccaagcctctcatcactaccctactccctaagatgattgcacgcatcaacgactggtttgaggaagtgaaagctaagcgcggcaagcgcccgacagccttccagttcctgcaagaaatcaagccggaagccgtagcgtacatcaccattaagaccactctggcttgcctaaccagtgcggacaatacaaccgttcaggctgtagcaagcgcaatcggtcgggccattgaggacgaggctcgcttcggtcgtatccgtgaccttgaagctaagcacttcaagaagaacgttgaggaacaactcaacaagcgcgtagggcacgtctacaagaaagcatttatgcaagttgtcgagcacgacatgctctctaagggtctactcggtggcgaggcgtggtcttcgtggcataaggaagactctattcatgtaggagtacgctgcatcgagatgctcattgagtcaaccggaatggttagcttacaccgccaaaatgctggcgtagtaggtcaagactctgagactatcgaactcgcacctgaatacgctgaggctatcgcaacccgtgcaggtgcgctggctggcatctctccgatgttccaaccttgcgtagttcctcctaagccgtggactggcattactggtggtggctattgggctgcggggcgcaaacccctgcagttagtacgtactcgcagtctggcggcgcttcgccgctatgaagaagtgtcgatgccggaggtcatcaaagcagtcaacattgcgcagaatacagcatggcgtattaacaagaaagttctcgacgtagcgaataccatcacccaatggcagcactgtccagtcgcggatgtgcctgcgatggatcgtggcgaaatgccagctcgtccgttggacatcgataccaacgagattgcacttaaagcgtggaagaaagaagcttccgcgttctaccgcaaagacaaagcacgcgttagccgtcgtctgtcaatggagtttatgttatctcaggcgaacaagtttgcgaattatgaggcaatctggtttccgcaaaacatggattggcgtgggcgcgtgtacgctgtcccgatgttcaatcctcagggcaacgatatgacgaaaggcctgctgacctttgcgcaggagaaacccattggtgaagacggcttctattggctcaagattcatggcgcaaatacagctggagtggataaagtaccgtttccacaacgcatcaaatttgttgaggataaccatacgaatattatggaatgcgcgaaagcaccgctggaaaacacttggtgggcggaacaggactcgccgttctgttttctggcgttctgctttgagtatgctggcgtcatcaatagtggtctgtcgtacaactgtagcttgcctctggcatttgatggtagttgctccggcctgcaacatttctcagcgatgttacgcgacgaaattggcggcaaagctgtgaatctcctcccatctgcggaataccaggatatttatcgtatcgtcagcgacaaagttaacgagatgctgaaacaagatctgattaacggtaccgataccaccgtggaaacggtgactgataagaagacaggcgaaattacccaacgcacgaaatacgggaccaaagttatggcacagtggtggttagaacacggtgtgaatcgtggcgtcacgaaacgctcggttatgactttggtgtatgggagcaaagagtttggattccgcgatcaagtgctgagtgacaccattcaaccggcgatcgataacggcaaaggtgacatgtttctgaatccgaatcaggctgctggttacatggcgaaactgatctggaacgcagtgtccgggaccgtagtcgcagcagttgaggcgatgaactggctgaaaagtgcggcgaaattacttgctgctgaagtgaaggatcctaagacggatacagttctgcgtggccgctgcgcagtacattgggtgactcccgacggcttccctgtgtggcaggaatacaagaagcctattcagacgcgcttgaacctgatgttcctcggtcagttccgcttacagcctaccattaacaccaacaaagatagcgagattgatgcacacaaacaggagtctggtatcgctcctaactttgtacacagccaagacggtaaccaccttcgtatgactgtagtgtgggcacacgagaagtacggaatcgaatcttttgcactgattcacgactccttcggtaccattccggctgacgctgcgaacctgttcaaagcagtgcgcgaaactttcgttgacacatatgagtcttgtgatgtactggctgatttctacgaccagttcgctgaccagttgcacgagtctcaacgcgacaaaatgccagcacttccggctaaaggtaacttgaacctccgtgacatcttaaaatcggacttcgcgttcgcg

SEQ ID NO: 1362 - protein, 890 aa, synthetic construct
  REGION 1..890: note = Variant of RNA polymerase
MHHHHHHMNTINIAKNDFSDIELAAIPFNTLADHYGERLAREQLALEHESYEMGEARFRKMFERQLKAGEVADNAAAKPLITTLLPKMIARINDWFEEVKAKRGKRPTAFQFLQEIKPEAVAYITIKTTLACLTSADNTTVQAVASAIGRAIEDEARFGRIRDLEAKHFKKNVEEQLNKRVGHVYKKAFMQVVEHDMLSKGLLGGEAWSSWHKEDSIHVGVRCIEMLIESTGMVSLHRQNAGVVGQDSETIELAPEYAEAIATRAGALAGISPMFQPCVVPPKPWTGITGGGYWAAGRKPLQLVRTRSLAALRRYEEVSMPEVIKAVNIAQNTAWRINKKVLDVANTITQWQHCPVADVPAMDRGEMPARPLDIDTNEIALKAWKKEASAFYRKDKARVSRRLSMEFMLSQANKFANYEAIWFPQNMDWRGRVYAVPMFNPQGNDMTKGLLTFAQEKPIGEDGFYWLKIHGANTAGVDKVPFPQRIKFVEDNHTNIMECAKAPLENTWWAEQDSPFCFLAFCFEYAGVINSGLSYNCSLPLAFDGSCSGLQHFSAMLRDEIGGKAVNLLPSAEYQDIYRIVSDKVNEMLKQDLINGTDTTVETVTDKKTGEITQRTKYGTKVMAQWWLEHGVNRGVTKRSVMTLVYGSKEFGFRDQVLSDTIQPAIDNGKGDMFLNPNQAAGYMAKLIWNAVSGTVVAAVEAMNWLKSAAKLLAAEVKDPKTDTVLRGRCAVHWVTPDGFPVWQEYKKPIQTRLNLMFLGQFRLQPTINTNKDSEIDAHKQESGIAPNFVHSQDGNHLRMTVVWAHEKYGIESFALIHDSFGTIPADAANLFKAVRETFVDTYESCDVLADFYDQFADQLHESQRDKMPALPAKGNLNLRDILKSDFAFA

SEQ ID NO: 1363 - DNA, 2670 bp, synthetic construct
  misc_feature 1..2670: note = Variant of RNA polymerase
  source 1..2670: mol_type = other DNA
atgcaccatcaccatcaccatatgaacacgattaacattgctaagaacgacttctctgacatcgaactggctgctatcccgttcaacactctggctgaccattacggtgagcgtttagctcgcgaacagttggcccttgagcatgagtcttacgagatgggtgaagcacgcttccgcaagatgtttgagcgtcaacttaaagctggtgaggttgcggataacgctgccgccaagcctctcatcactaccctactccctaagatgattgcacgcatcaacgactggtttgaggaagtgaaagctaagcgcggcaagcgcccgacagccttccagttcctgcaagaaatcaagccggaagccgtagcgtacatcaccattaagaccactctggcttgcctaaccagtgcggacaatacaaccgttcaggctgtagcaagcgcaatcggtcgggccattgaggacgaggctcgcttcggtcgtatccgtgaccttgaagctaagcacttcaagaagaacgttgaggaacaactcaacaagcgcgtagggcacgtctacaagaaagcatttatgcaagttgtcgagcacgacatgctctctaagggtctactcggtggcgaggcgtggtcttcgtggcataaggaagactctattcatgtaggagtacgctgcatcgagatgctcattgagtcaaccggaatggttagcttacaccgccaaaatgctggcgtagtaggtcaagactctgagactatcgaactcgcacctgaatacgctgaggctatcgcaacccgtgcaggtgcgctggctggcatctctccgatgttccaaccttgcgtagttcctcctaagccgtggactggcattactggtggtggctattgggctgcggggcgcaaacccctgcagttagtacgtactcgcagtctggcggcgcttcgccgctatgaagaagtgtcgatgccggaggtcatcaaagcagtcaacattgcgcagaatacagcatggcgtattaacaagaaagttctcgacgtagcgaataccatcacccaatggcagcactgtccagtcgcggatgtgcctgcgatggatcgtggcgaaatgccagctcgtccgttggacatcgataccaacgagattgcacttaaagcgtggaagaaagaagcttccgcgttctaccgcaaagacaaagcacgcgttagccgtcgtctgtcaatggagtttatgttatctcaggcgaacaagtttgcgaattatgaggcaatctggtttccgcaaaacatggattggcgtgggcgcgtgtacgctgtcccgatgttcaatcctcagggcaacgatatgacgaaaggcctgctgacctttgcgcaggagaaacccattggtgaagacggcttctattggctcaagattcatggcgcaaatacagctggagtggataaagtaccgtttccacaacgcatcaaatttgttgaggataaccatacgaatattatggaatgcgcgaaagcaccgctggaaaacacttggtgggcggaacaggactcgccgttctgttttctggcgttctgctttgagtatgctggcgtcatccacagtggtctgtcgtacaactgtagcttgcctctggcatttgatggtagttgctccggcctgcaacatttctcagcgatgttacgcgacgaaattggcggcaaagctgtgaatctcctcccatctgcggaataccaggatatttatcgtatcgtcagcgacaaagttaacgagatgctgaaacaagatctgattaacggtacctctaccaccgtggaaacggtgactgataagaagacaggcgaaattacccaacgcacgaaatacgggaccaaagttatggcacagtggtggttagaacacggtgtgaatcgtggcgtcacgaaacgctcggttatgactttggtgtatgggagcaaagagtttggattccgcgatcaagtgctgagtgacaccattcaaccggcgatcgataacggcaaaggtgacatgtttctgaatccgaatcaggctgctggttacatggcgaaactgatctggaacgcagtgtccgggaccgtagtcgcagcagttgaggcgatgaactggctgaaaagtgcggcgaaattacttgctgctgaagtgaaggatcctaagacggatacagttctgcgtggccgctgcgcagtacattgggtgactcccgacggcttccctgtgtggcaggaatacaagaagcctattcagacgcgcttgaacctgatgttcctcggtcagttccgcttacagcctaccattaacaccaacaaagatagcgagattgatgcacacaaacaggagtctggtatcgctcctaactttgtacacagccaagacggtaaccaccttcgtatgactgtagtgtgggcacacgagaagtacggaatcgaatcttttgcactgattcacgactccttcggtaccattccggctgacgctgcgaacctgttcaaagcagtgcgcgaaactttcgttgacacatatgagtcttgtgatgtactggctgatttctacgaccagttcgctgaccagttgcacgagtctcaacgcgacaaaatgccagcacttccggctaaaggtaacttgaacctccgtgacatcttaaaatcggacttcgcgttcgcg

SEQ ID NO: 1364 - protein, 890 aa, synthetic construct
  REGION 1..890: note = Variant of RNA polymerase
MHHHHHHMNTINIAKNDFSDIELAAIPFNTLADHYGERLAREQLALEHESYEMGEARFRKMFERQLKAGEVADNAAAKPLITTLLPKMIARINDWFEEVKAKRGKRPTAFQFLQEIKPEAVAYITIKTTLACLTSADNTTVQAVASAIGRAIEDEARFGRIRDLEAKHFKKNVEEQLNKRVGHVYKKAFMQVVEHDMLSKGLLGGEAWSSWHKEDSIHVGVRCIEMLIESTGMVSLHRQNAGVVGQDSETIELAPEYAEAIATRAGALAGISPMFQPCVVPPKPWTGITGGGYWAAGRKPLQLVRTRSLAALRRYEEVSMPEVIKAVNIAQNTAWRINKKVLDVANTITQWQHCPVADVPAMDRGEMPARPLDIDTNEIALKAWKKEASAFYRKDKARVSRRLSMEFMLSQANKFANYEAIWFPQNMDWRGRVYAVPMFNPQGNDMTKGLLTFAQEKPIGEDGFYWLKIHGANTAGVDKVPFPQRIKFVEDNHTNIMECAKAPLENTWWAEQDSPFCFLAFCFEYAGVIHSGLSYNCSLPLAFDGSCSGLQHFSAMLRDEIGGKAVNLLPSAEYQDIYRIVSDKVNEMLKQDLINGTSTTVETVTDKKTGEITQRTKYGTKVMAQWWLEHGVNRGVTKRSVMTLVYGSKEFGFRDQVLSDTIQPAIDNGKGDMFLNPNQAAGYMAKLIWNAVSGTVVAAVEAMNWLKSAAKLLAAEVKDPKTDTVLRGRCAVHWVTPDGFPVWQEYKKPIQTRLNLMFLGQFRLQPTINTNKDSEIDAHKQESGIAPNFVHSQDGNHLRMTVVWAHEKYGIESFALIHDSFGTIPADAANLFKAVRETFVDTYESCDVLADFYDQFADQLHESQRDKMPALPAKGNLNLRDILKSDFAFA

SEQ ID NO: 1365 - DNA, 2670 bp, synthetic construct
  misc_feature 1..2670: note = Variant of RNA polymerase
  source 1..2670: mol_type = other DNA
atgcaccatcaccatcaccatatgaacacgattaacattgctaagaacgacttctctgacatcgaactggctgctatcccgttcaacactctggctgaccattacggtgagcgtttagctcgcgaacagttggcccttgagcatgagtcttacgagatgggtgaagcacgcttccgcaagatgtttgagcgtcaacttaaagctggtgaggttgcggataacgctgccgccaagcctctcatcactaccctactccctaagatgattgcacgcatcaacgactggtttgaggaagtgaaagctaagcgcggcaagcgcccgacagccttccagttcctgcaagaaatcaagccggaagccgtagcgtacatcaccattaagaccactctggcttgcctaaccagtgcggacaatacaaccgttcaggctgtagcaagcgcaatcggtcgggccattgaggacgaggctcgcttcggtcgtatccgtgaccttgaagctaagcacttcaagaagaacgttgaggaacaactcaacaagcgcgtagggcacgtctacaagaaagcatttatgcaagttgtcgagcacgacatgctctctaagggtctactcggtggcgaggcgtggtcttcgtggcataaggaagactctattcatgtaggagtacgctgcatcgagatgctcattgagtcaaccggaatggttagcttacaccgccaaaatgctggcgtagtaggtcaagactctgagactatcgaactcgcacctgaatacgctgaggctatcgcaacccgtgcaggtgcgctggctggcatctctccgatgttccaaccttgcgtagttcctcctaagccgtggactggcattactggtggtggctattgggctgcggggcgcaaacccctgcagttagtacgtactcgcagtctggcggcgcttcgccgctatgaagaagtgtcgatgccggaggtcatcaaagcagtcaacattgcgcagaatacagcatggcgtattaacaagaaagttctcgacgtagcgaataccatcacccaatggcagcactgtccagtcgcggatgtgcctgcgatggatcgtggcgaaatgccagctcgtccgttggacatcgataccaacgagattgcacttaaagcgtggaagaaagaagcttccgcgttctaccgcaaagacaaagcacgcgttagccgtcgtctgtcaatggagtttatgttatctcaggcgaacaagtttgcgaattatgaggcaatctggtttccgcaaaacatggattggcgtgggcgcgtgtacgctgtcccgatgttcaatcctcagggcaacgatatgacgaaaggcctgctgacctttgcgcaggagaaacccattggtgaagacggcttctattggctcaagattcatggcgcaaatacagctggagtggataaagtaccgtttccacaacgcatcaaatttgttgaggagaaccatacgaatattatggaatgcgcgaaagcaccgctggaaaacacttggtgggcggaacaggactcgccgttctgttttctggcgttctgctttgagtatgctggcgtcatcaatagtggtctgtcgtacaactgtagcttgcctctggcatttgatggtagttgctccggcctgcaacatttctcagcgatgttacgcgacgaaattggcggcaaagctgtgaatctcctcccatctgcggaataccaggatatttatcgtatcgtcagcgacaaagttaacgagatgctgaaacaagatctgattaacggtacctctaccaccgtggaaacggtgactgataagaagacaggcgaaattacccaacgcacgaaatacgggaccaaagttatggcacagtggtggttagaacacggtgtgaatcgtggcgtcacgaaacgctcggttatgactttggtgtatgggagcaaagagtttggattccgcgatcaagtgctgagtgacaccattcaaccggcgatcgataacggcaaaggtgacatgtttctgaatccgaatcaggctgctggttacatggcgaaactgatctggaacgcagtgtccgggaccgtagtcgcagcagttgaggcgatgaactggctgaaaagtgcggcgaaattacttgctgctgaagtgaaggatcctaagacggatacagttctgcgtggccgctgcgcagtacattgggtgactcccgacggcttccctgtgtggcaggaatacaagaagcctattcagacgcgcttgaacctgatgttcctcggtcagttccgcttacagcctaccattaacaccaacaaagatagcgagattgatgcacacaaacaggagtctggtatcgctcctaactttgtacacagccaagacggtaaccaccttcgtatgactgtagtgtgggcacacgagaagtacggaatcgaatcttttgcactgattcacgactccttcggtaccattccggctgacgctgcgaacctgttcaaagcagtgcgcgaaactttcgttgacacatatgagtcttgtgatgtactggctgatttctacgaccagttcgctgaccagttgcacgagtctcaacgcgacaaaatgccagcacttccggctaaaggtaacttgaacctccgtgacatcttaaaatcggacttcgcgttcgcg

SEQ ID NO: 1366 - protein, 890 aa, synthetic construct
  REGION 1..890: note = Variant of RNA polymerase
MHHHHHHMNTINIAKNDFSDIELAAIPFNTLADHYGERLAREQLALEHESYEMGEARFRKMFERQLKAGEVADNAAAKPLITTLLPKMIARINDWFEEVKAKRGKRPTAFQFLQEIKPEAVAYITIKTTLACLTSADNTTVQAVASAIGRAIEDEARFGRIRDLEAKHFKKNVEEQLNKRVGHVYKKAFMQVVEHDMLSKGLLGGEAWSSWHKEDSIHVGVRCIEMLIESTGMVSLHRQNAGVVGQDSETIELAPEYAEAIATRAGALAGISPMFQPCVVPPKPWTGITGGGYWAAGRKPLQLVRTRSLAALRRYEEVSMPEVIKAVNIAQNTAWRINKKVLDVANTITQWQHCPVADVPAMDRGEMPARPLDIDTNEIALKAWKKEASAFYRKDKARVSRRLSMEFMLSQANKFANYEAIWFPQNMDWRGRVYAVPMFNPQGNDMTKGLLTFAQEKPIGEDGFYWLKIHGANTAGVDKVPFPQRIKFVEENHTNIMECAKAPLENTWWAEQDSPFCFLAFCFEYAGVINSGLSYNCSLPLAFDGSCSGLQHFSAMLRDEIGGKAVNLLPSAEYQDIYRIVSDKVNEMLKQDLINGTSTTVETVTDKKTGEITQRTKYGTKVMAQWWLEHGVNRGVTKRSVMTLVYGSKEFGFRDQVLSDTIQPAIDNGKGDMFLNPNQAAGYMAKLIWNAVSGTVVAAVEAMNWLKSAAKLLAAEVKDPKTDTVLRGRCAVHWVTPDGFPVWQEYKKPIQTRLNLMFLGQFRLQPTINTNKDSEIDAHKQESGIAPNFVHSQDGNHLRMTVVWAHEKYGIESFALIHDSFGTIPADAANLFKAVRETFVDTYESCDVLADFYDQFADQLHESQRDKMPALPAKGNLNLRDILKSDFAFA

SEQ ID NO: 1367 - DNA, 2670 bp, synthetic construct
  misc_feature 1..2670: note = Variant of RNA polymerase
  source 1..2670: mol_type = other DNA
atgcaccatcaccatcaccatatgaacacgattaacattgctaagaacgacttctctgacatcgaactggctgctatcccgttcaacactctggctgaccattacggtgagcgtttagctcgcgaacagttggcccttgagcatgagtcttacgagatgggtgaagcacgcttccgcaagatgtttgagcgtcaacttaaagctggtgaggttgcggataacgctgccgccaagcctctcatcactaccctactccctaagatgattgcacgcatcaacgactggtttgaggaagtgaaagctaagcgcggcaagcgcccgacagccttccagttcctgcaagaaatcaagccggaagccgtagcgtacatcaccattaagaccactctggcttgcctaaccagtgcggacaatacaaccgttcaggctgtagcaagcgcaatcggtcgggccattgaggacgaggctcgcttcggtcgtatccgtgaccttgaagctaagcacttcaagaagaacgttgaggaacaactcaacaagcgcgtagggcacgtctacaagaaagcatttatgcaagttgtcgagcacgacatgctctctaagggtctactcggtggcgaggcgtggtcttcgtggcataaggaagactctattcatgtaggagtacgctgcatcgagatgctcattgagtcaaccggaatggttagcttacaccgccaaaatgctggcgtagtaggtcaagactctgagactatcgaactcgcacctgaatacgctgaggctatcgcaacccgtgcaggtgcgctggctggcatctctccgatgttccaaccttgcgtagttcctcctaagccgtggactggcattactggtggtggctattgggctgcggggcgcaaacccctgcagttagtacgtactcgcagtctggcggcgcttcgccgctatgaagaagtgtcgatgccggaggtcatcaaagcagtcaacattgcgcagaatacagcatggcgtattaacaagaaagttctcgacgtagcgaataccatcacccaatggcagcactgtccagtcgcggatgtgcctgcgatggatcgtgaggaaatgccagctcgtccgttggacatcgataccaacgagattgcacttaaagcgtggaagaaagaagcttccgcgttctaccgcaaagacaaagcacgcgttagccgtcgtctgtcaatggagtttatgttatctcaggcgaacaagtttgcgaattatgaggcaatctggtttccgcaaaacatggattggcgtgggcgcgtgtacgctgtcccgatgttcaatcctcagggcaacgatatgacgaaaggcctgctgacctttgcgcaggagaaacccattggtgaagacggcttctattggctcaagattcatggcgcaaatacagctggagtggataaagtaccgtttccacaacgcatcaaatttgttgaggataaccatacgaatattatggaatgcgcgaaagcaccgctggaaaacacttggtgggcggaacaggactcgccgttctgttttctggcgttctgctttgagtatgctggcgtcatcaatagtggtctgtcgtacaactgtagcttgcctctggcatttgatggtagttgctccggcctgcaacatttctcagcgatgttacgcgacgaaattggcggcaaagctgtgaatctcctcccatctgcggaataccaggatatttatcgtatcgtcagcgacaaagttaacgagatgctgaaacaagatctgattaacggtacctctaccaccgtggaaacggtgactgataagaagacaggcgaaattacccaacgcacgaaatacgggaccaaagttatggcacagtggtggttagaacacggtgtgaatcgtggcgtcacgaaacgctcggttatgactttggtgtatgggagcaaagagtttggattccgcgatcaagtgctgagtgacaccattcaaccggcgatcgataacggcaaaggtgacatgtttctgaatccgaatcaggctgctggttacatggcgaaactgatctggaacgcagtgtccgggaccgtagtcgcagcagttgaggcgatgaactggctgaaaagtgcggcgaaattacttgctgctgaagtgaaggatcctaagacggatacagttctgcgtggccgctgcgcagtacattgggtgactcccgacggcttccctgtgtggcaggaatacaagaagcctattcagacgcgcttgaacctgatgttcctcggtcagttccgcttacagcctaccattaacaccaacaaagatagcgagattgatgcacacaaacaggagtctggtatcgctcctaactttgtacacagccaagacggtaaccaccttcgtatgactgtagtgtgggcacacgagaagtacggaatcgaatcttttgcactgattcacgactccttcggtaccattccggctgacgctgcgaacctgttcaaagcagtgcgcgaaactttcgttgacacatatgagtcttgtgatgtactggctgatttctacgaccagttcgctgaccagttgcacgagtctcaacgcgacaaaatgccagcacttccggctaaaggtaacttgaacctccgtgacatcttaaaatcggacttcgcgttcgcg

SEQ ID NO: 1368 - protein, 890 aa, synthetic construct
  REGION 1..890: note = Variant of RNA polymerase
MHHHHHHMNTINIAKNDFSDIELAAIPFNTLADHYGERLAREQLALEHESYEMGEARFRKMFERQLKAGEVADNAAAKPLITTLLPKMIARINDWFEEVKAKRGKRPTAFQFLQEIKPEAVAYITIKTTLACLTSADNTTVQAVASAIGRAIEDEARFGRIRDLEAKHFKKNVEEQLNKRVGHVYKKAFMQVVEHDMLSKGLLGGEAWSSWHKEDSIHVGVRCIEMLIESTGMVSLHRQNAGVVGQDSETIELAPEYAEAIATRAGALAGISPMFQPCVVPPKPWTGITGGGYWAAGRKPLQLVRTRSLAALRRYEEVSMPEVIKAVNIAQNTAWRINKKVLDVANTITQWQHCPVADVPAMDREEMPARPLDIDTNEIALKAWKKEASAFYRKDKARVSRRLSMEFMLSQANKFANYEAIWFPQNMDWRGRVYAVPMFNPQGNDMTKGLLTFAQEKPIGEDGFYWLKIHGANTAGVDKVPFPQRIKFVEDNHTNIMECAKAPLENTWWAEQDSPFCFLAFCFEYAGVINSGLSYNCSLPLAFDGSCSGLQHFSAMLRDEIGGKAVNLLPSAEYQDIYRIVSDKVNEMLKQDLINGTSTTVETVTDKKTGEITQRTKYGTKVMAQWWLEHGVNRGVTKRSVMTLVYGSKEFGFRDQVLSDTIQPAIDNGKGDMFLNPNQAAGYMAKLIWNAVSGTVVAAVEAMNWLKSAAKLLAAEVKDPKTDTVLRGRCAVHWVTPDGFPVWQEYKKPIQTRLNLMFLGQFRLQPTINTNKDSEIDAHKQESGIAPNFVHSQDGNHLRMTVVWAHEKYGIESFALIHDSFGTIPADAANLFKAVRETFVDTYESCDVLADFYDQFADQLHESQRDKMPALPAKGNLNLRDILKSDFAFA

SEQ ID NO: 1369 - DNA, 2670 bp, synthetic construct
  misc_feature 1..2670: note = Variant of RNA polymerase
  source 1..2670: mol_type = other DNA
atgcaccatcaccatcaccatatgaacacgattaacattgctaagaacgacttctctgacatcgaactggctgctatcccgttcaacactctggctgaccattacggtgagcgtttagctcgcgaacagttggcccttgagcatgagtcttacgagatgggtgaagcacgcttccgcaagatgtttgagcgtcaacttaaagctggtgaggttgcggataacgctgccgccaagcctctcatcactaccctactccctaagatgattgcacgcatcaacgactggtttgaggaagtgaaagctaagcgcggcaagcgcccgacagccttccagttcctgcaagaaatcaagccggaagccgtagcgtacatcaccattaagaccactctggcttgcctaaccagtgcggacaatacaaccgttcaggctgtagcaagcgcaatcggtcgggccattgaggacgaggctcgcttcggtcgtatccgtgaccttgaagctaagcacttcaagaagaacgttgaggaacaactcaacaagcgcgtagggcacgtctacaagaaagcatttatgcaagttgtcgagcacgacatgctctctaagggtctactcggtggcgaggcgtggtcttcgtggcataaggaagactctattcatgtaggagtacgctgcatcgagatgctcattgagtcaaccggaatggttagcttacaccgccaaaatgctggcgtagtaggtcaagactctgagactatcgaactcgcacctgaatacgctgaggctatcgcaacccgtgcaggtgcgctggctggcatctctccgatgttccaaccttgcgtagttcctcctaagccgtggactggcattactggtggtggctattgggctgcggggcgcaaacccctgcagttagtacgtactcgcagtctggcggcgcttcgccgctatgaagaagtgtcgatgccggaggtcatcaaagcagtcaacattgcgcagaatacagcatggcgtattaacaagaaagttctcgacgtagcgaataccatcacccaatggcagcactgtccagtcgcggatgtgcctgcgatggatcgtggcgaaatgccagctcgtccgttggacatcgataccaacgagattgcacttaaagcgtggaagaaagaagcttccgcgttctaccgcaaagacaaagcacgcgttagccgtcgtctgtcaatggagtttatgttatctcaggcgaacaagtttgcgaattatgaggcaatctggtttccgcaaaacatggattggcgtgggcgcgtgtacgctgtcccgatgttcaatcctcagggcaacgatatgacgaaaggcctgctgacctttgcgcaggagaaacccattggtgaagacggcttctattggctcaagattcatggcgcaaatacagctggagtggataaagtaccgtttccacaacgcatcaaatttgttgaggataaccatacgaatattatggaatgcgcgaaagcaccgctggaaaacacttggtgggcggaacaggactcgccgttctgttttctggcgttctgctttgagtatgctggcgtcatcaatagtggtctgtcgtacaactgtagcttgcctctggcatttgatggtagttgctccggcctgcaacatttctcagcgatgttacgcgacgaaattggcggcaaagctgtgaatctcctcccatctgcggaataccaggatatttatcgtatcgtcagcgacaaagttaacgagatgctgaaacaagatctgattaacggtacctctaccaccgtggaaacggtgactgataagaagacaggcgaaattacccaacgcacgaaatacgggaccaaagttatggcacagtggtggttagaacacggtgtgaatcgtggcgtcacgaaacgctcggttatgactttggtgtatgggagcaaagagtttggattccgcgatcaagtgctgagtgacaccattcaaccggcgatcgataacggcaaaggtgacatgtttctgaatccgaatcaggctgctggttacatggcgaaactgatctggaacgcagtgtccgggaccgtagtcgcagcagttgaggcgatgaactggctgaaaagtgcggcgaaattacttgctgctgaagtgaaggatcctaagacggatgaggttctgcgtggccgctgcgcagtacattgggtgactcccgacggcttccctgtgtggcaggaatacaagaagcctattcagacgcgcttgaacctgatgttcctcggtcagttccgcttacagcctaccattaacaccaacaaagatagcgagattgatgcacacaaacaggagtctggtatcgctcctaactttgtacacagccaagacggtaaccaccttcgtatgactgtagtgtgggcacacgagaagtacggaatcgaatcttttgcactgattcacgactccttcggtaccattccggctgacgctgcgaacctgttcaaagcagtgcgcgaaactttcgttgacacatatgagtcttgtgatgtactggctgatttctacgaccagttcgctgaccagttgcacgagtctcaacgcgacaaaatgccagcacttccggctaaaggtaacttgaacctccgtgacatcttaaaatcggacttcgcgttcgcg

SEQ ID NO: 1370 - protein, 890 aa, synthetic construct
  REGION 1..890: note = Variant of RNA polymerase
MHHHHHHMNTINIAKNDFSDIELAAIPFNTLADHYGERLAREQLALEHESYEMGEARFRKMFERQLKAGEVADNAAAKPLITTLLPKMIARINDWFEEVKAKRGKRPTAFQFLQEIKPEAVAYITIKTTLACLTSADNTTVQAVASAIGRAIEDEARFGRIRDLEAKHFKKNVEEQLNKRVGHVYKKAFMQVVEHDMLSKGLLGGEAWSSWHKEDSIHVGVRCIEMLIESTGMVSLHRQNAGVVGQDSETIELAPEYAEAIATRAGALAGISPMFQPCVVPPKPWTGITGGGYWAAGRKPLQLVRTRSLAALRRYEEVSMPEVIKAVNIAQNTAWRINKKVLDVANTITQWQHCPVADVPAMDRGEMPARPLDIDTNEIALKAWKKEASAFYRKDKARVSRRLSMEFMLSQANKFANYEAIWFPQNMDWRGRVYAVPMFNPQGNDMTKGLLTFAQEKPIGEDGFYWLKIHGANTAGVDKVPFPQRIKFVEDNHTNIMECAKAPLENTWWAEQDSPFCFLAFCFEYAGVINSGLSYNCSLPLAFDGSCSGLQHFSAMLRDEIGGKAVNLLPSAEYQDIYRIVSDKVNEMLKQDLINGTSTTVETVTDKKTGEITQRTKYGTKVMAQWWLEHGVNRGVTKRSVMTLVYGSKEFGFRDQVLSDTIQPAIDNGKGDMFLNPNQAAGYMAKLIWNAVSGTVVAAVEAMNWLKSAAKLLAAEVKDPKTDEVLRGRCAVHWVTPDGFPVWQEYKKPIQTRLNLMFLGQFRLQPTINTNKDSEIDAHKQESGIAPNFVHSQDGNHLRMTVVWAHEKYGIESFALIHDSFGTIPADAANLFKAVRETFVDTYESCDVLADFYDQFADQLHESQRDKMPALPAKGNLNLRDILKSDFAFA

SEQ ID NO: 1371 - DNA, 2670 bp, synthetic construct
  misc_feature 1..2670: note = Variant of RNA polymerase
  source 1..2670: mol_type = other DNA
atgcaccatcaccatcaccatatgaacacgattaacattgctaagaacgacttctctgacatcgaactggctgctatcccgttcaacactctggctgaccattacggtgagcgtttagctcgcgaacagttggcccttgagcatgagtcttacgagatgggtgaagcacgcttccgcaagatgtttgagcgtcaacttaaagctggtgaggttgcggataacgctgccgccaagcctctcatcactaccctactccctaagatgattgcacgcatcaacgactggtttgaggaagtgaaagctaagcgcggcaagcgcccgacagccttccagttcctgcaagaaatcaagccggaagccgtagcgtacatcaccattaagaccactctggcttgcctaaccagtgcggacaatacaaccgttcaggctgtagcaagcgcaatcggtcgggccattgaggacgaggctcgcttcggtcgtatccgtgaccttgaagctaagcacttcaagaagaacgttgaggaacaactcaacaagcgcgtagggcacgtctacaagaaagcatttatgcaagttgtcgagcacgacatgctctctaagggtctactcggtggcgaggcgtggtcttcgtggcataaggaagactctattcatgtaggagtacgctgcatcgagatgctcattgagtcaaccggaatggttagcttacaccgccaaaatgctggcgtagtaggtcaagactctgagactatcgaactcgcacctgaatacgctgaggctatcgcaacccgtgcaggtgcgctggctggcatctctccgatgttccaaccttgcgtagttcctcctaagccgtggactggcattactggtggtggctattgggctgcggggcgcaaacccctgcagttagtacgtactcgcagtctggcggcgcttcgccgctatgaagaagtgtcgatgccggaggtcatcaaagcagtcaacattgcgcagaatacagcatggcgtattaacaagaaagttctcgacgtagcgaataccatcacccaatggcagcactgtccagtcgcggatgtgcctgcgatggatcgtggcgaaatgccagctcgtccgttggacatcgataccaacgagattgcacttaaagcgtggaagaaagaagcttccgcgttctaccgcaaagacaaagcacgcgttagccgtcgtctgtcaatggagtttatgttatctcaggcgaacaagtttgcgaattatgaggcaatctggtttccgcaaaacatggattggcgtgggcgcgtgtacgctgtcccgatgttcaatcctcagggcaacgatatgacgaaaggcctgctgacctttgcgcaggagaaacccattggtaaagacggcttctattggctcaagattcatggcgcaaatacagctggagtggataaagtaccgtttccacaacgcatcaaatttgttgaggataaccatacgaatattatggaatgcgcgaaagcaccgctggaaaacacttggtgggcggaacaggactcgccgttctgttttctggcgttctgctttgagtatgctggcgtcatcaatagtggtctgtcgtacaactgtagcttgcctctggcatttgatggtagttgctccggcctgcaacatttctcagcgatgttacgcgacgaaattggcggcaaagctgtgaatctcctcccatctgcggaataccaggatatttatcgtatcgtcagcgacaaagttaacgagatgctgaaacaagatctgattaacggtacctctaccaccgtggaaacggtgactgataagaagacaggcgaaattacccaacgcacgaaatacgggaccaaagttatggcacagtggtggttagaacacggtgtgaatcgtggcgtcacgaaacgctcggttatgactttggtgtatgggagcaaagagtttggattccgcgatcaagtgctgagtgacaccattcaaccggcgatcgataacggcaaaggtgacatgtttctgaatccgaatcaggctgctggttacatggcgaaactgatctggaacgcagtgtccgggaccgtagtcgcagcagttgaggcgatgaactggctgaaaagtgcggcgaaattacttgctgctgaagtgaaggatcctaagacggatacagttctgcgtggccgctgcgcagtacattgggtgactcccgacggcttccctgtgtggcaggaatacaagaagcctattcagacgcgcttgaacctgatgttcctcggtcagttccgcttacagcctaccattaacaccaacaaagatagcgagattgatgcacacaaacaggagtctggtatcgctcctaactttgtacacagccaagacggtaaccaccttcgtatgactgtagtgtgggcacacgagaagtacggaatcgaatcttttgcactgattcacgactccttcggtaccattccggctgacgctgcgaacctgttcaaagcagtgcgcgaaactttcgttgacacatatgagtcttgtgatgtactggctgatttctacgaccagttcgctgaccagttgcacgagtctcaacgcgacaaaatgccagcacttccggctaaaggtaacttgaacctccgtgacatcttaaaatcggacttcgcgttcgcg

SEQ ID NO: 1372 - protein, 890 aa, synthetic construct
  REGION 1..890: note = Variant of RNA polymerase
MHHHHHHMNTINIAKNDFSDIELAAIPFNTLADHYGERLAREQLALEHESYEMGEARFRKMFERQLKAGEVADNAAAKPLITTLLPKMIARINDWFEEVKAKRGKRPTAFQFLQEIKPEAVAYITIKTTLACLTSADNTTVQAVASAIGRAIEDEARFGRIRDLEAKHFKKNVEEQLNKRVGHVYKKAFMQVVEHDMLSKGLLGGEAWSSWHKEDSIHVGVRCIEMLIESTGMVSLHRQNAGVVGQDSETIELAPEYAEAIATRAGALAGISPMFQPCVVPPKPWTGITGGGYWAAGRKPLQLVRTRSLAALRRYEEVSMPEVIKAVNIAQNTAWRINKKVLDVANTITQWQHCPVADVPAMDRGEMPARPLDIDTNEIALKAWKKEASAFYRKDKARVSRRLSMEFMLSQANKFANYEAIWFPQNMDWRGRVYAVPMFNPQGNDMTKGLLTFAQEKPIGKDGFYWLKIHGANTAGVDKVPFPQRIKFVEDNHTNIMECAKAPLENTWWAEQDSPFCFLAFCFEYAGVINSGLSYNCSLPLAFDGSCSGLQHFSAMLRDEIGGKAVNLLPSAEYQDIYRIVSDKVNEMLKQDLINGTSTTVETVTDKKTGEITQRTKYGTKVMAQWWLEHGVNRGVTKRSVMTLVYGSKEFGFRDQVLSDTIQPAIDNGKGDMFLNPNQAAGYMAKLIWNAVSGTVVAAVEAMNWLKSAAKLLAAEVKDPKTDTVLRGRCAVHWVTPDGFPVWQEYKKPIQTRLNLMFLGQFRLQPTINTNKDSEIDAHKQESGIAPNFVHSQDGNHLRMTVVWAHEKYGIESFALIHDSFGTIPADAANLFKAVRETFVDTYESCDVLADFYDQFADQLHESQRDKMPALPAKGNLNLRDILKSDFAFA

SEQ ID NO: 1373 - DNA, 2670 bp, synthetic construct
  misc_feature 1..2670: note = Variant of RNA polymerase
  source 1..2670: mol_type = other DNA
atgcaccatcaccatcaccatatgaacacgattaacattgctaagaacgacttctctgacatcgaactggctgctatcccgttcaacactctggctgaccattacggtgagcgtttagctcgcgaacagttggcccttgagcatgagtcttacgagatgggtgaagcacgcttccgcaagatgtttgagcgtcaacttaaagctggtgaggttgcggataacgctgccgccaagcctctcatcactaccctactccctaagatgattgcacgcatcaacgactggtttgaggaagtgaaagctaagcgcggcaagcgcccgacagccttccagttcctgcaagaaatcaagccggaagccgtagcgtacatcaccattaagaccactctggcttgcctaaccagtgcggacaatacaaccgttcaggctgtagcaagcgcaatcggtcgggccattgaggacgaggctcgcttcggtcgtatccgtgaccttgaagctaagcacttcaagaagaacgttgaggaacaactcaacaagcgcgtagggcacgtctacaagaaagcatttatgcaagttgtcgagcacgacatgctctctaagggtctactcggtggcgaggcgtggtcttcgtggcataaggaagactctattcatgtaggagtacgctgcatcgagatgctcattgagtcaaccggaatggttagcttacaccgccaaaatgctggcgtagtaggtcaagactctgagactatcgaactcgcacctgaatacgctgaggctatcgcaacccgtgcaggtgcgctggctggcatctctccgatgttccaaccttgcgtagttcctcctaagccgtggactggcattactggtggtggctattgggctgcggggcgcaaacccctgcagttagtacgtactcgcagtctggcggcgcttcgccgctatgaagaagtgtcgatgccggaggtcatcaaagcagtcaacattgcgcagaatacagcatggcgtattaacaagaaagttctcgacgtagcgaataccatcacccaatggcagcactgtccagtcgcggatgtgcctgcgatggatcgtggcgaaatgccagctcgtccgttggacatcgataccaacgagattgcacttaaagcgtggaagaaagaagcttccgcgttctaccgcaaagacaaagcacgcgttagccgtcgtctgtcaatggagtttatgttatctcaggcgaacaagtttgcgaattatgaggcaatctggtttccgcaaaacatggattggcgtgggcgcgtgtacgctgtcccgatgttcaatcctcagggcaacgatatgacgaaaggcctgctgacctttgcgcaggagaaacccattggtgaagacggcttctattggctcaagattcatggcgcaaatacagctggagtggataaagtaccgtttccacaacgcatcaaatttgttgaggataaccatacgaatattatggaatgcgcgaaagcaccgctggaaaacacttggtgggcggaacaggactcgccgttctgttttctggcgttctgctttgagtatgctggcgtcatcaatagtggtctgtcgtacaactgtagcttgcctctggcatttgatggtagttgctccggcctgcaacatttctcagcgatgttacgcgacgaaattggcggcaaagctgtgaatctcctcccatctgcggaataccaggatatttatcgtatcgtcagcgacaaagttaacgagatgctgaaacaagatctgattaacggtacctctaccaccgtggaaacggtgactgataagaagacaggcgaaattacccaaaaaacgaaatacgggaccaaagttatggcacagtggtggttagaacacggtgtgaatcgtggcgtcacgaaacgctcggttatgactttggtgtatgggagcaaagagtttggattccgcgatcaagtgctgagtgacaccattcaaccggcgatcgataacggcaaaggtgacatgtttctgaatccgaatcaggctgctggttacatggcgaaactgatctggaacgcagtgtccgggaccgtagtcgcagcagttgaggcgatgaactggctgaaaagtgcggcgaaattacttgctgctgaagtgaaggatcctaagacggatacagttctgcgtggccgctgcgcagtacattgggtgactcccgacggcttccctgtgtggcaggaatacaagaagcctattcagacgcgcttgaacctgatgttcctcggtcagttccgcttacagcctaccattaacaccaacaaagatagcgagattgatgcacacaaacaggagtctggtatcgctcctaactttgtacacagccaagacggtaaccaccttcgtatgactgtagtgtgggcacacgagaagtacggaatcgaatcttttgcactgattcacgactccttcggtaccattccggctgacgctgcgaacctgttcaaagcagtgcgcgaaactttcgttgacacatatgagtcttgtgatgtactggctgatttctacgaccagttcgctgaccagttgcacgagtctcaacgcgacaaaatgccagcacttccggctaaaggtaacttgaacctccgtgacatcttaaaatcggacttcgcgttcgcg

SEQ ID NO: 1374 - protein, 890 aa, synthetic construct
  REGION 1..890: note = Variant of RNA polymerase
MHHHHHHMNTINIAKNDFSDIELAAIPFNTLADHYGERLAREQLALEHESYEMGEARFRKMFERQLKAGEVADNAAAKPLITTLLPKMIARINDWFEEVKAKRGKRPTAFQFLQEIKPEAVAYITIKTTLACLTSADNTTVQAVASAIGRAIEDEARFGRIRDLEAKHFKKNVEEQLNKRVGHVYKKAFMQVVEHDMLSKGLLGGEAWSSWHKEDSIHVGVRCIEMLIESTGMVSLHRQNAGVVGQDSETIELAPEYAEAIATRAGALAGISPMFQPCVVPPKPWTGITGGGYWAAGRKPLQLVRTRSLAALRRYEEVSMPEVIKAVNIAQNTAWRINKKVLDVANTITQWQHCPVADVPAMDRGEMPARPLDIDTNEIALKAWKKEASAFYRKDKARVSRRLSMEFMLSQANKFANYEAIWFPQNMDWRGRVYAVPMFNPQGNDMTKGLLTFAQEKPIGEDGFYWLKIHGANTAGVDKVPFPQRIKFVEDNHTNIMECAKAPLENTWWAEQDSPFCFLAFCFEYAGVINSGLSYNCSLPLAFDGSCSGLQHFSAMLRDEIGGKAVNLLPSAEYQDIYRIVSDKVNEMLKQDLINGTSTTVETVTDKKTGEITQKTKYGTKVMAQWWLEHGVNRGVTKRSVMTLVYGSKEFGFRDQVLSDTIQPAIDNGKGDMFLNPNQAAGYMAKLIWNAVSGTVVAAVEAMNWLKSAAKLLAAEVKDPKTDTVLRGRCAVHWVTPDGFPVWQEYKKPIQTRLNLMFLGQFRLQPTINTNKDSEIDAHKQESGIAPNFVHSQDGNHLRMTVVWAHEKYGIESFALIHDSFGTIPADAANLFKAVRETFVDTYESCDVLADFYDQFADQLHESQRDKMPALPAKGNLNLRDILKSDFAFA

SEQ ID NO: 1375 - DNA, 2670 bp, synthetic construct
  misc_feature 1..2670: note = Variant of RNA polymerase
  source 1..2670: mol_type = other DNA
atgcaccatcaccatcaccatatgaacacgattaacattgctaagaacgacttctctgacatcgaactggctgctatcccgttcaacactctggctgaccattacggtgagcgtttagctcgcgaacagttggcccttgagcatgagtcttacgagatgggtgaagcacgcttccgcaagatgtttgagcgtcaacttaaagctggtgaggttgcggataacgctgccgccaagcctctcatcactaccctactccctaagatgattgcacgcatcaacgactggtttgaggaagtgaaagctaagcgcggcaagcgcccgacagccttccagttcctgcaagaaatcaagccggaagccgtagcgtacatcaccattaagaccactctggcttgcctaaccagtgcggacaatacaaccgttcaggctgtagcaagcgcaatcggtcgggccattgaggacgaggctcgcttcggtcgtatccgtgaccttgaagctaagcacttcaagaagaacgttgaggaacaactcaacaagcgcgtagggcacgtctacaagaaagcatttatgcaagttgtcgagcacgacatgctctctaagggtctactcggtggcgaggcgtggtcttcgtggcataaggaagactctattcatgtaggagtacgctgcatcgagatgctcattgagtcaaccggaatggttagcttacaccgccaaaatgctggcgtagtaggtcaagactctgagactatcgaactcgcacctgaatacgctgaggctatcgcaacccgtgcaggtgcgctggctggcatctctccgatgttccaaccttgcgtagttcctcctaagccgtggactggcattactggtggtggctattgggctgcggggcgcaaacccctgcagttagtacgtactcgcagtctggcggcgcttcgccgctatgaagaagtgtcgatgccggaggtcatcaaagcagtcaacattgcgcagaatacagcatggcgtattaacaagaaagttctcgacgtagcgaataccatcacccaatggcagcactgtccagtcgcggatgtgcctgcgatcgatcgtggcgaaatgccagctcgtccgttggacatcgataccaacgagattgcacttaaagcgtggaagaaagaagcttccgcgttctaccgcaaagacaaagcacgcgttagccgtcgtctgtcaatggagtttatgttatctcaggcgaacaagtttgcgaattatgaggcaatctggtttccgcaaaacatggattggcgtgggcgcgtgtacgctgtcccgatgttcaatcctcagggcaacgatatgacgaaaggcctgctgacctttgcgcaggagaaacccattggtgaagacggcttctattggctcaagattcatggcgcaaatacagctggagtggataaagtaccgtttccacaacgcatcaaatttgttgaggataaccatacgaatattatggaatgcgcgaaagcaccgctggaaaacacttggtgggcggaacaggactcgccgttctgttttctggcgttctgctttgagtatgctggcgtcatcaatagtggtctgtcgtacaactgtagcttgcctctggcatttgatggtagttgctccggcctgcaacatttctcagcgatgttacgcgacgaaattggcggcaaagctgtgaatctcctcccatctgcggaataccaggatatttatcgtatcgtcagcgacaaagttaacgagatgctgaaacaagatctgattaacggtacctctaccaccgtggaaacggtgactgataagaagacaggcgaaattacccaacgcacgaaatacgggaccaaagttatggcacagtggtggttagaacacggtgtgaatcgtggcgtcacgaaacgctcggttatgactttggtgtatgggagcaaagagtttggattccgcgatcaagtgctgagtgacaccattcaaccggcgatcgataacggcaaaggtgacatgtttctgaatccgaatcaggctgctggttacatggcgaaactgatctggaacgcagtgtccgggaccgtagtcgcagcagttgaggcgatgaactggctgaaaagtgcggcgaaattacttgctgctgaagtgaaggatcctaagacggatacagttctgcgtggccgctgcgcagtacattgggtgactcccgacggcttccctgtgtggcaggaatacaagaagcctattcagacgcgcttgaacctgatgttcctcggtcagttccgcttacagcctaccattaacaccaacaaagatagcgagattgatgcacacaaacaggagtctggtatcgctcctaactttgtacacagccaagacggtaaccaccttcgtatgactgtagtgtgggcacacgagaagtacggaatcgaatcttttgcactgattcacgactccttcggtaccattccggctgacgctgcgaacctgttcaaagcagtgcgcgaaactttcgttgacacatatgagtcttgtgatgtactggctgatttctacgaccagttcgctgaccagttgcacgagtctcaacgcgacaaaatgccagcacttccggctaaaggtaacttgaacctccgtgacatcttaaaatcggacttcgcgttcgcg

SEQ ID NO: 1376 - protein, 890 aa, synthetic construct
  REGION 1..890: note = Variant of RNA polymerase
MHHHHHHMNTINIAKNDFSDIELAAIPFNTLADHYGERLAREQLALEHESYEMGEARFRKMFERQLKAGEVADNAAAKPLITTLLPKMIARINDWFEEVKAKRGKRPTAFQFLQEIKPEAVAYITIKTTLACLTSADNTTVQAVASAIGRAIEDEARFGRIRDLEAKHFKKNVEEQLNKRVGHVYKKAFMQVVEHDMLSKGLLGGEAWSSWHKEDSIHVGVRCIEMLIESTGMVSLHRQNAGVVGQDSETIELAPEYAEAIATRAGALAGISPMFQPCVVPPKPWTGITGGGYWAAGRKPLQLVRTRSLAALRRYEEVSMPEVIKAVNIAQNTAWRINKKVLDVANTITQWQHCPVADVPAIDRGEMPARPLDIDTNEIALKAWKKEASAFYRKDKARVSRRLSMEFMLSQANKFANYEAIWFPQNMDWRGRVYAVPMFNPQGNDMTKGLLTFAQEKPIGEDGFYWLKIHGANTAGVDKVPFPQRIKFVEDNHTNIMECAKAPLENTWWAEQDSPFCFLAFCFEYAGVINSGLSYNCSLPLAFDGSCSGLQHFSAMLRDEIGGKAVNLLPSAEYQDIYRIVSDKVNEMLKQDLINGTSTTVETVTDKKTGEITQRTKYGTKVMAQWWLEHGVNRGVTKRSVMTLVYGSKEFGFRDQVLSDTIQPAIDNGKGDMFLNPNQAAGYMAKLIWNAVSGTVVAAVEAMNWLKSAAKLLAAEVKDPKTDTVLRGRCAVHWVTPDGFPVWQEYKKPIQTRLNLMFLGQFRLQPTINTNKDSEIDAHKQESGIAPNFVHSQDGNHLRMTVVWAHEKYGIESFALIHDSFGTIPADAANLFKAVRETFVDTYESCDVLADFYDQFADQLHESQRDKMPALPAKGNLNLRDILKSDFAFA

SEQ ID NO: 1377 - DNA, 2670 bp, synthetic construct
  misc_feature 1..2670: note = Variant of RNA polymerase
  source 1..2670: mol_type = other DNA
atgcaccatcaccatcaccatatgaacacgattaacattgctaagaacgacttctctgacatcgaactggctgctatcccgttcaacactctggctgaccattacggtgagcgtttagctcgcgaacagttggcccttgagcatgagtcttacgagatgggtgaagcacgcttccgcaagatgtttgagcgtcaacttaaagctggtgaggttgcggataacgctgccgccaagcctctcatcactaccctactccctaagatgattgcacgcatcaacgactggtttgaggaagtgaaagctaagcgcggcaagcgcccgacagccttccagttcctgcaagaaatcaagccggaagccgtagcgtacatcaccattaagaccactctggcttgcctaaccagtgcggacaatacaaccgttcaggctgtagcaagcgcaatcggtcgggccattgaggacgaggctcgcttcggtcgtatccgtgaccttgaagctaagcacttcaagaagaacgttgaggaacaactcaacaagcgcgtagggcacgtctacaagaaagcatttatgcaagttgtcgagcacgacatgctctctaagggtctactcggtggcgaggcgtggtcttcgtggcataaggaagactctattcatgtaggagtacgctgcatcgagatgctcattgagtcaaccggaatggttagcttacaccgccaaaatgctggcgtagtaggtcaagactctgagactatcgaactcgcacctgaatacgctgaggctatcgcaacccgtgcaggtgcgctggctggcatctctccgatgttccaaccttgcgtagttcctcctaagccgtggactggcattactggtggtggctattgggctgcggggcgcaaacccctgcagttagtacgtactcgcagtctggcggcgcttcgccgctatgaagaagtgtcgatgccggaggtcatcaaagcagtcaacattgcgcagaatacagcatggcgtattaacaagaaagttctcgacgtagcgaataccatcacccaatggcagcactgtccagtcgcggatatccctgcgatggatcgtggcgaaatgccagctcgtccgttggacatcgataccaacgagattgcacttaaagcgtggaagaaagaagcttccgcgttctaccgcaaagacaaagcacgcgttagccgtcgtctgtcaatggagtttatgttatctcaggcgaacaagtttgcgaattatgaggcaatctggtttccgcaaaacatggattggcgtgggcgcgtgtacgctgtcccgatgttcaatcctcagggcaacgatatgacgaaaggcctgctgacctttgcgcaggagaaacccattggtgaagacggcttctattggctcaagattcatggcgcaaatacagctggagtggataaagtaccgtttccacaacgcatcaaatttgttgaggataaccatacgaatattatggaatgcgcgaaagcaccgctggaaaacacttggtgggcggaacaggactcgccgttctgttttctggcgttctgctttgagtatgctggcgtcatcaatagtggtctgtcgtacaactgtagcttgcctctggcatttgatggtagttgctccggcctgcaacatttctcagcgatgttacgcgacgaaattggcggcaaagctgtgaatctcctcccatctgcggaataccaggatatttatcgtatcgtcagcgacaaagttaacgagatgctgaaacaagatctgattaacggtacctctaccaccgtggaaacggtgactgataagaagacaggcgaaattacccaacgcacgaaatacgggaccaaagttatggcacagtggtggttagaacacggtgtgaatcgtggcgtcacgaaacgctcggttatgactttggtgtatgggagcaaagagtttggattccgcgatcaagtgctgagtgacaccattcaaccggcgatcgataacggcaaaggtgacatgtttctgaatccgaatcaggctgctggttacatggcgaaactgatctggaacgcagtgtccgggaccgtagtcgcagcagttgaggcgatgaactggctgaaaagtgcggcgaaattacttgctgctgaagtgaaggatcctaagacggatacagttctgcgtggccgctgcgcagtacattgggtgactcccgacggcttccctgtgtggcaggaatacaagaagcctattcagacgcgcttgaacctgatgttcctcggtcagttccgcttacagcctaccattaacaccaacaaagatagcgagattgatgcacacaaacaggagtctggtatcgctcctaactttgtacacagccaagacggtaaccaccttcgtatgactgtagtgtgggcacacgagaagtacggaatcgaatcttttgcactgattcacgactccttcggtaccattccggctgacgctgcgaacctgttcaaagcagtgcgcgaaactttcgttgacacatatgagtcttgtgatgtactggctgatttctacgaccagttcgctgaccagttgcacgagtctcaacgcgacaaaatgccagcacttccggctaaaggtaacttgaacctccgtgacatcttaaaatcggacttcgcgttcgcg

SEQ ID NO: 1378 - protein, 890 aa, synthetic construct
  REGION 1..890: note = Variant of RNA polymerase
MHHHHHHMNTINIAKNDFSDIELAAIPFNTLADHYGERLAREQLALEHESYEMGEARFRKMFERQLKAGEVADNAAAKPLITTLLPKMIARINDWFEEVKAKRGKRPTAFQFLQEIKPEAVAYITIKTTLACLTSADNTTVQAVASAIGRAIEDEARFGRIRDLEAKHFKKNVEEQLNKRVGHVYKKAFMQVVEHDMLSKGLLGGEAWSSWHKEDSIHVGVRCIEMLIESTGMVSLHRQNAGVVGQDSETIELAPEYAEAIATRAGALAGISPMFQPCVVPPKPWTGITGGGYWAAGRKPLQLVRTRSLAALRRYEEVSMPEVIKAVNIAQNTAWRINKKVLDVANTITQWQHCPVADIPAMDRGEMPARPLDIDTNEIALKAWKKEASAFYRKDKARVSRRLSMEFMLSQANKFANYEAIWFPQNMDWRGRVYAVPMFNPQGNDMTKGLLTFAQEKPIGEDGFYWLKIHGANTAGVDKVPFPQRIKFVEDNHTNIMECAKAPLENTWWAEQDSPFCFLAFCFEYAGVINSGLSYNCSLPLAFDGSCSGLQHFSAMLRDEIGGKAVNLLPSAEYQDIYRIVSDKVNEMLKQDLINGTSTTVETVTDKKTGEITQRTKYGTKVMAQWWLEHGVNRGVTKRSVMTLVYGSKEFGFRDQVLSDTIQPAIDNGKGDMFLNPNQAAGYMAKLIWNAVSGTVVAAVEAMNWLKSAAKLLAAEVKDPKTDTVLRGRCAVHWVTPDGFPVWQEYKKPIQTRLNLMFLGQFRLQPTINTNKDSEIDAHKQESGIAPNFVHSQDGNHLRMTVVWAHEKYGIESFALIHDSFGTIPADAANLFKAVRETFVDTYESCDVLADFYDQFADQLHESQRDKMPALPAKGNLNLRDILKSDFAFA

SEQ ID NO: 1379 - DNA, 2670 bp, synthetic construct
  misc_feature 1..2670: note = Variant of RNA polymerase
  source 1..2670: mol_type = other DNA
atgcaccatcaccatcaccatatgaacacgattaacattgctaagaacgacttctctgacatcgaactggctgctatcccgttcaacactctggctgaccattacggtgagcgtttagctcgcgaacagttggcccttgagcatgagtcttacgagatgggtgaagcacgcttccgcaagatgtttgagcgtcaacttaaagctggtgaggttgcggataacgctgccgccaagcctctcatcactaccctactccctaagatgattgcacgcatcaacgactggtttgaggaagtgaaagctaagcgcggcaagcgcccgacagccttccagttcctgcaagaaatcaagccggaagccgtagcgtacatcaccattaagaccactctggcttgcctaaccagtgcggacaatacaaccgttcaggctgtagcaagcgcaatcggtcgggccattgaggacgaggctcgcttcggtcgtatccgtgaccttgaagctaagcacttcaagaagaacgttgaggaacaactcaacaagcgcgtagggcacgtctacaagaaagcatttatgcaagttgtcgagcacgacatgctctctaagggtctactcggtggcgaggcgtggtcttcgtggcataaggaagactctattcatgtaggagtacgctgcatcgagatgctcattgagtcaaccggaatggttagcttacaccgccaaaatgctggcgtagtaggtcaagactctgagactatcgaactcgcacctgaatacgctgaggctatcgcaacccgtgcaggtgcgctggctggcatctctccgatgttccaaccttgcgtagttcctcctaagccgtggactggcattactggtggtggctattgggctgcggggcgcaaacccctgcagttagtacgtactcgcagtctggcggcgcttcgccgctatgaagaagtgtcgatgccggaggtcatcaaagcagtcaacattgcgcagaatacagcatggcgtattaacaagaaagttctcgacgtagcgaataccatcacccaatggcagcactgtccagtcgcggatgtgcctgcgatggatcgtggcgaaatgccagctcgtccgttggacatcgataccaacgagattgcacttaaagcgtggaagaaagaagcttccgcgttctaccgcaaagacaaagcacgcgttagccgtcgtctgtcaatggagtttatgttatctcaggcgaacaagtttgcgaattatgaggcaatctggtttccgcaaaacatggattggcgtgggcgcgtgtacgctgtcccgatgttcaatcctcagggcaacgatatgacgaaaggcctgctgacctttgcgcaggagaaacccattggtgaagacggcttctattggctcaagattcatggcgcaaatacagctggagtggataaagtaccgtttccacaacgcatcaaatttgttgaggataaccatacgaatattatggaatgcgcgaaagcaccgctggaaaacacttggtgggcggaacaggactcgccgttctgttttctggcgttctgctttgagtatgctggcgtcatcaatagtggtctgtcgtacaactgtagcttgcctctggcatttgatggtagttgctccggcctgcaacatttctcagcgatgttacgcgacgaaattggcggcaaagctgtgaatctcctcccatctgcggaataccaggatatttatcgtatcgtcagcgacaaagttaacgagatgctgaaacaagatctgattaacggtacctctaccaccgtggaaacggtgactgataagaagacaggcgaaattacccaacgcacgaaatacgggaccaaagttatggcacagtggtggttagaacacggtgtgacccgtggcgtcacgaaacgctcggttatgactttggtgtatgggagcaaagagtttggattccgcgatcaagtgctgagtgacaccattcaaccggcgatcgataacggcaaaggtgacatgtttctgaatccgaatcaggctgctggttacatggcgaaactgatctggaacgcagtgtccgggaccgtagtcgcagcagttgaggcgatgaactggctgaaaagtgcggcgaaattacttgctgctgaagtgaaggatcctaagacggatacagttctgcgtggccgctgcgcagtacattgggtgactcccgacggcttccctgtgtggcaggaatacaagaagcctattcagacgcgcttgaacctgatgttcctcggtcagttccgcttacagcctaccattaacaccaacaaagatagcgagattgatgcacacaaacaggagtctggtatcgctcctaactttgtacacagccaagacggtaaccaccttcgtatgactgtagtgtgggcacacgagaagtacggaatcgaatcttttgcactgattcacgactccttcggtaccattccggctgacgctgcgaacctgttcaaagcagtgcgcgaaactttcgttgacacatatgagtcttgtgatgtactggctgatttctacgaccagttcgctgaccagttgcacgagtctcaacgcgacaaaatgccagcacttccggctaaaggtaacttgaacctccgtgacatcttaaaatcggacttcgcgttcgcg

SEQ ID NO: 1380 - protein, 890 aa, synthetic construct
  REGION 1..890: note = Variant of RNA polymerase
MHHHHHHMNTINIAKNDFSDIELAAIPFNTLADHYGERLAREQLALEHESYEMGEARFRKMFERQLKAGEVADNAAAKPLITTLLPKMIARINDWFEEVKAKRGKRPTAFQFLQEIKPEAVAYITIKTTLACLTSADNTTVQAVASAIGRAIEDEARFGRIRDLEAKHFKKNVEEQLNKRVGHVYKKAFMQVVEHDMLSKGLLGGEAWSSWHKEDSIHVGVRCIEMLIESTGMVSLHRQNAGVVGQDSETIELAPEYAEAIATRAGALAGISPMFQPCVVPPKPWTGITGGGYWAAGRKPLQLVRTRSLAALRRYEEVSMPEVIKAVNIAQNTAWRINKKVLDVANTITQWQHCPVADVPAMDRGEMPARPLDIDTNEIALKAWKKEASAFYRKDKARVSRRLSMEFMLSQANKFANYEAIWFPQNMDWRGRVYAVPMFNPQGNDMTKGLLTFAQEKPIGEDGFYWLKIHGANTAGVDKVPFPQRIKFVEDNHTNIMECAKAPLENTWWAEQDSPFCFLAFCFEYAGVINSGLSYNCSLPLAFDGSCSGLQHFSAMLRDEIGGKAVNLLPSAEYQDIYRIVSDKVNEMLKQDLINGTSTTVETVTDKKTGEITQRTKYGTKVMAQWWLEHGVTRGVTKRSVMTLVYGSKEFGFRDQVLSDTIQPAIDNGKGDMFLNPNQAAGYMAKLIWNAVSGTVVAAVEAMNWLKSAAKLLAAEVKDPKTDTVLRGRCAVHWVTPDGFPVWQEYKKPIQTRLNLMFLGQFRLQPTINTNKDSEIDAHKQESGIAPNFVHSQDGNHLRMTVVWAHEKYGIESFALIHDSFGTIPADAANLFKAVRETFVDTYESCDVLADFYDQFADQLHESQRDKMPALPAKGNLNLRDILKSDFAFA

SEQ ID NO: 1381 - DNA, 2670 bp, synthetic construct
  misc_feature 1..2670: note = Variant of RNA polymerase
  source 1..2670: mol_type = other DNA
atgcaccatcaccatcaccatatgaacacgattaacattgctaagaacgacttctctgacatcgaactggctgctatcccgttcaacactctggctgaccattacggtgagcgtttagctcgcgaacagttggcccttgagcatgagtcttacgagatgggtgaagcacgcttccgcaagatgtttgagcgtcaacttaaagctggtgaggttgcggataacgctgccgccaagcctctcatcactaccctactccctaagatgattgcacgcatcaacgactggtttgaggaagtgaaagctaagcgcggcaagcgcccgacagccttccagttcctgcaagaaatcaagccggaagccgtagcgtacatcaccattaagaccactctggcttgcctaaccagtgcggacaatacaaccgttcaggctgtagcaagcgcaatcggtcgggccattgaggacgaggctcgcttcggtcgtatccgtgaccttgaagctaagcacttcaagaagaacgttgaggaacaactcaacaagcgcgtagggcacgtctacaagaaagcatttatgcaagttgtcgagcacgacatgctctctaagggtctactcggtggcgaggcgtggtcttcgtggcataaggaagactctattcatgtaggagtacgctgcatcgagatgctcattgagtcaaccggaatggttagcttacaccgccaaaatgctggcgtagtaggtcaagactctgagactatcgaactcgcacctgaatacgctgaggctatcgcaacccgtgcaggtgcgctggctggcatctctccgatgttccaaccttgcgtagttcctcctaagccgtggactggcattactggtggtggctattgggctgcggggcgcaaacccctggccttagtacgtactcgcagtctggcggcgcttcgccgctatgaagaagtgtcgatgccggaggtcatcaaagcagtcaacattgcgcagaatacagcatggcgtattaacaagaaagttctcgacgtagcgaataccatcacccaatggcagcactgtccagtcgcggatgtgcctgcgatggatcgtggcgaaatgccagctcgtccgttggacatcgataccaacgagattgcacttaaagcgtggaagaaagaagcttccgcgttctaccgcaaagacaaagcacgcgttagccgtcgtctgtcaatggagtttatgttatctcaggcgaacaagtttgcgaattatgaggcaatctggtttccgcaaaacatggattggcgtgggcgcgtgtacgctgtcccgatgttcaatcctcagggcaacgatatgacgaaaggcctgctgacctttgcgcaggagaaacccattggtgaagacggcttctattggctcaagattcatggcgcaaatacagctggagtggataaagtaccgtttccacaacgcatcaaatttgttgaggataaccatacgaatattatggaatgcgcgaaagcaccgctggaaaacacttggtgggcggaacaggactcgccgttctgttttctggcgttctgctttgagtatgctggcgtcatcaatagtggtctgtcgtacaactgtagcttgcctctggcatttgatggtagttgctccggcctgcaacatttctcagcgatgttacgcgacgaaattggcggcaaagctgtgaatctcctcccatctgcggaataccaggatatttatcgtatcgtcagcgacaaagttaacgagatgctgaaacaagatctgattaacggtacctctaccaccgtggaaacggtgactgataagaagacaggcgaaattacccaacgcacgaaatacgggaccaaagttatggcacagtggtggttagaacacggtgtgaatcgtggcgtcacgaaacgctcggttatgactttggtgtatgggagcaaagagtttggattccgcgatcaagtgctgagtgacaccattcaaccggcgatcgataacggcaaaggtgacatgtttctgaatccgaatcaggctgctggttacatggcgaaactgatctggaacgcagtgtccgggaccgtagtcgcagcagttgaggcgatgaactggctgaaaagtgcggcgaaattacttgctgctgaagtgaaggatcctaagacggatacagttctgcgtggccgctgcgcagtacattgggtgactcccgacggcttccctgtgtggcaggaatacaagaagcctattcagacgcgcttgaacctgatgttcctcggtcagttccgcttacagcctaccattaacaccaacaaagatagcgagattgatgcacacaaacaggagtctggtatcgctcctaactttgtacacagccaagacggtaaccaccttcgtatgactgtagtgtgggcacacgagaagtacggaatcgaatcttttgcactgattcacgactccttcggtaccattccggctgacgctgcgaacctgttcaaagcagtgcgcgaaactttcgttgacacatatgagtcttgtgatgtactggctgatttctacgaccagttcgctgaccagttgcacgagtctcaacgcgacaaaatgccagcacttccggctaaaggtaacttgaacctccgtgacatcttaaaatcggacttcgcgttcgcg

SEQ ID NO: 1382 - protein, 890 aa, synthetic construct
  REGION 1..890: note = Variant of RNA polymerase
MHHHHHHMNTINIAKNDFSDIELAAIPFNTLADHYGERLAREQLALEHESYEMGEARFRKMFERQLKAGEVADNAAAKPLITTLLPKMIARINDWFEEVKAKRGKRPTAFQFLQEIKPEAVAYITIKTTLACLTSADNTTVQAVASAIGRAIEDEARFGRIRDLEAKHFKKNVEEQLNKRVGHVYKKAFMQVVEHDMLSKGLLGGEAWSSWHKEDSIHVGVRCIEMLIESTGMVSLHRQNAGVVGQDSETIELAPEYAEAIATRAGALAGISPMFQPCVVPPKPWTGITGGGYWAAGRKPLALVRTRSLAALRRYEEVSMPEVIKAVNIAQNTAWRINKKVLDVANTITQWQHCPVADVPAMDRGEMPARPLDIDTNEIALKAWKKEASAFYRKDKARVSRRLSMEFMLSQANKFANYEAIWFPQNMDWRGRVYAVPMFNPQGNDMTKGLLTFAQEKPIGEDGFYWLKIHGANTAGVDKVPFPQRIKFVEDNHTNIMECAKAPLENTWWAEQDSPFCFLAFCFEYAGVINSGLSYNCSLPLAFDGSCSGLQHFSAMLRDEIGGKAVNLLPSAEYQDIYRIVSDKVNEMLKQDLINGTSTTVETVTDKKTGEITQRTKYGTKVMAQWWLEHGVNRGVTKRSVMTLVYGSKEFGFRDQVLSDTIQPAIDNGKGDMFLNPNQAAGYMAKLIWNAVSGTVVAAVEAMNWLKSAAKLLAAEVKDPKTDTVLRGRCAVHWVTPDGFPVWQEYKKPIQTRLNLMFLGQFRLQPTINTNKDSEIDAHKQESGIAPNFVHSQDGNHLRMTVVWAHEKYGIESFALIHDSFGTIPADAANLFKAVRETFVDTYESCDVLADFYDQFADQLHESQRDKMPALPAKGNLNLRDILKSDFAFA

SEQ ID NO: 1383 - DNA, 2670 bp, synthetic construct
  misc_feature 1..2670: note = Variant of RNA polymerase
  source 1..2670: mol_type = other DNA
atgcaccatcaccatcaccatatgaacacgattaacattgctaagaacgacttctctgacatcgaactggctgctatcccgttcaacactctggctgaccattacggtgagcgtttagctcgcgaacagttggcccttgagcatgagtcttacgagatgggtgaagcacgcttccgcaagatgtttgagcgtcaacttaaagctggtgaggttgcggataacgctgccgccaagcctctcatcactaccctactccctaagatgattgcacgcatcaacgactggtttgaggaagtgaaagctaagcgcggcaagcgcccgacagccttccagttcctgcaagaaatcaagccggaagccgtagcgtacatcaccattaagaccactctggcttgcctaaccagtgcggacaatacaaccgttcaggctgtagcaagcgcaatcggtcgggccattgaggacgaggctcgcttcggtcgtatccgtgaccttgaagctaagcacttcaagaagaacgttgaggaacaactcaacaagcgcgtagggcacgtctacaagaaagcatttatgcaagttgtcgagcacgacatgctctctaagggtctactcggtggcgaggcgtggtcttcgtggcataaggaagactctattcatgtaggagtacgctgcatcgagatgctcattgagtcaaccggaatggttagcttacaccgccaaaatgctggcgtagtaggtcaagactctgagactatcgaactcgcacctgaatacgctgaggctatcgcaacccgtgcaggtgcgctggctggcatctctccgatgttccaaccttgcgtagttcctcctaagccgtggactggcattactggtggtggctattgggctgcggggcgcaaacccctgcagttagtacgtactcgcagtctggcggcgcttcgccgctatgaagaagtgtcgatgccggaggtctataaagcagtcaacattgcgcagaatacagcatggcgtattaacaagaaagttctcgacgtagcgaataccatcacccaatggcagcactgtccagtcgcggatgtgcctgcgatggatcgtggcgaaatgccagctcgtccgttggacatcgataccaacgagattgcacttaaagcgtggaagaaagaagcttccgcgttctaccgcaaagacaaagcacgcgttagccgtcgtctgtcaatggagtttatgttatctcaggcgaacaagtttgcgaattatgaggcaatctggtttccgcaaaacatggattggcgtgggcgcgtgtacgctgtcccgatgttcaatcctcagggcaacgatatgacgaaaggcctgctgacctttgcgcaggagaaacccattggtgaagacggcttctattggctcaagattcatggcgcaaatacagctggagtggataaagtaccgtttccacaacgcatcaaatttgttgaggataaccatacgaatattatggaatgcgcgaaagcaccgctggaaaacacttggtgggcggaacaggactcgccgttctgttttctggcgttctgctttgagtatgctggcgtcatcaatagtggtctgtcgtacaactgtagcttgcctctggcatttgatggtagttgctccggcctgcaacatttctcagcgatgttacgcgacgaaattggcggcaaagctgtgaatctcctcccatctgcggaataccaggatatttatcgtatcgtcagcgacaaagttaacgagatgctgaaacaagatctgattaacggtacctctaccaccgtggaaacggtgactgataagaagacaggcgaaattacccaacgcacgaaatacgggaccaaagttatggcacagtggtggttagaacacggtgtgaatcgtggcgtcacgaaacgctcggttatgactttggtgtatgggagcaaagagtttggattccgcgatcaagtgctgagtgacaccattcaaccggcgatcgataacggcaaaggtgacatgtttctgaatccgaatcaggctgctggttacatggcgaaactgatctggaacgcagtgtccgggaccgtagtcgcagcagttgaggcgatgaactggctgaaaagtgcggcgaaattacttgctgctgaagtgaaggatcctaagacggatacagttctgcgtggccgctgcgcagtacattgggtgactcccgacggcttccctgtgtggcaggaatacaagaagcctattcagacgcgcttgaacctgatgttcctcggtcagttccgcttacagcctaccattaacaccaacaaagatagcgagattgatgcacacaaacaggagtctggtatcgctcctaactttgtacacagccaagacggtaaccaccttcgtatgactgtagtgtgggcacacgagaagtacggaatcgaatcttttgcactgattcacgactccttcggtaccattccggctgacgctgcgaacctgttcaaagcagtgcgcgaaactttcgttgacacatatgagtcttgtgatgtactggctgatttctacgaccagttcgctgaccagttgcacgagtctcaacgcgacaaaatgccagcacttccggctaaaggtaacttgaacctccgtgacatcttaaaatcggacttcgcgttcgcg

SEQ ID NO: 1384 - protein, 890 aa, synthetic construct
  REGION 1..890: note = Variant of RNA polymerase
MHHHHHHMNTINIAKNDFSDIELAAIPFNTLADHYGERLAREQLALEHESYEMGEARFRKMFERQLKAGEVADNAAAKPLITTLLPKMIARINDWFEEVKAKRGKRPTAFQFLQEIKPEAVAYITIKTTLACLTSADNTTVQAVASAIGRAIEDEARFGRIRDLEAKHFKKNVEEQLNKRVGHVYKKAFMQVVEHDMLSKGLLGGEAWSSWHKEDSIHVGVRCIEMLIESTGMVSLHRQNAGVVGQDSETIELAPEYAEAIATRAGALAGISPMFQPCVVPPKPWTGITGGGYWAAGRKPLQLVRTRSLAALRRYEEVSMPEVYKAVNIAQNTAWRINKKVLDVANTITQWQHCPVADVPAMDRGEMPARPLDIDTNEIALKAWKKEASAFYRKDKARVSRRLSMEFMLSQANKFANYEAIWFPQNMDWRGRVYAVPMFNPQGNDMTKGLLTFAQEKPIGEDGFYWLKIHGANTAGVDKVPFPQRIKFVEDNHTNIMECAKAPLENTWWAEQDSPFCFLAFCFEYAGVINSGLSYNCSLPLAFDGSCSGLQHFSAMLRDEIGGKAVNLLPSAEYQDIYRIVSDKVNEMLKQDLINGTSTTVETVTDKKTGEITQRTKYGTKVMAQWWLEHGVNRGVTKRSVMTLVYGSKEFGFRDQVLSDTIQPAIDNGKGDMFLNPNQAAGYMAKLIWNAVSGTVVAAVEAMNWLKSAAKLLAAEVKDPKTDTVLRGRCAVHWVTPDGFPVWQEYKKPIQTRLNLMFLGQFRLQPTINTNKDSEIDAHKQESGIAPNFVHSQDGNHLRMTVVWAHEKYGIESFALIHDSFGTIPADAANLFKAVRETFVDTYESCDVLADFYDQFADQLHESQRDKMPALPAKGNLNLRDILKSDFAFA

SEQ ID NO: 1385 - DNA, 2670 bp, synthetic construct
  misc_feature 1..2670: note = Variant of RNA polymerase
  source 1..2670: mol_type = other DNA
atgcaccatcaccatcaccatatgaacacgattaacattgctaagaacgacttctctgacatcgaactggctgctatcccgttcaacactctggctgaccattacggtgagcgtttagctcgcgaacagttggcccttgagcatgagtcttacgagatgggtgaagcacgcttccgcaagatgtttgagcgtcaacttaaagctggtgaggttgcggataacgctgccgccaagcctctcatcactaccctactccctaagatgattgcacgcatcaacgactggtttgaggaagtgaaagctaagcgcggcaagcgcccgacagccttccagttcctgcaagaaatcaagccggaagccgtagcgtacatcaccattaagaccactctggcttgccagaccagtgcggacaatacaaccgttcaggctgtagcaagcgcaatcggtcgggccattgaggacgaggctcgcttcggtcgtatccgtgaccttgaagctaagcacttcaagaagaacgttgaggaacaactcaacaagcgcgtagggcacgtctacaagaaagcatttatgcaagttgtcgagcacgacatgctctctaagggtctactcggtggcgaggcgtggtcttcgtggcataaggaagactctattcatgtaggagtacgctgcatcgagatgctcattgagtcaaccggaatggttagcttacaccgccaaaatgctggcgtagtgggtcaggactctgagactatcgaactcgcacctgaatacgctgaggctatcgcaacccgtgcaggtgcgctggctggcatctctccgatgttccaaccttgcgtagttcctcctaagccgtggactggcattactggtggtggctattgggctgcggggcgcaaacccctgcagttagtacgtactcgcagtctggcggcgcttcgccgctatgaagaagtgtcgatgccggaggtcatcaaagcagtcaacattgcgcagaatacagcatggcgtattaacaagaaagttctcgacgtagcgaataccatcacccaatggcagcactgtccagtcgcggatgtgcctgcgatggatcgtggcgaaatgccagctcgtccgttggacatcgataccaacgagattgcacttaaagcgtggaagaaagaagcttccgcgttctaccgcaaagacaaagcacgcgttagccgtcgtctgtcaatggagtttatgttatctcaggcgaacaagtttgcgaattatgaggcaatctggtttccgcaaaacatggattggcgtgggcgcgtgtacgctgtcccgatgttcaatcctcagggcaacgatatgacgaaaggcctgctgacctttgcgcaggagaaacccattggtgaagacggcttctattggctcaagattcatggcgcaaatacagctggagtggataaagtaccgtttccacaacgcatcaaatttgttgaggataaccatacgaatattatggaatgcgcgaaagcaccgctggaaaacacttggtgggcggaacaggactcgccgttctgttttctggcgttctgctttgagtatgctggcgtcatcaatagtggtctgtcgtacaactgtagcttgcctctggcatttgatggtagttgctccggcctgcaacatttctcagcgatgttacgcgacgaaattggcggcaaagctgtgaatctcctcccatctgcggaataccaggatatttatcgtatcgtcagcgacaaagttaacgagatgctgaaacaagatctgattaacggtacctctaccaccgtggaaacggtgactgataagaagacaggcgaaattacccaacgcacgaaatacgggaccaaagttatggcacagtggtggttagaacacggtgtgaatcgtggcgtcacgaaacgctcggttatgactttggtgtatgggagcaaagagtttggattccgcgatcaagtgctgagtgacaccattcaaccggcgatcgataacggcaaaggtgacatgtttctgaatccgaatcaggctgctggttacatggcgaaactgatctggaacgcagtgtccgggaccgtagtcgcagcagttgaggcgatgaactggctgaaaagtgcggcgaaattacttgctgctgaagtgaaggatcctaagacggatacagttctgcgtggccgctgcgcagtacattgggtgactcccgacggcttccctgtgtggcaggaatacaagaagcctattcagacgcgcttgaacctgatgttcctcggtcagttccgcttacagcctaccattaacaccaacaaagatagcgagattgatgcacacaaacaggagtctggtatcgctcctaactttgtacacagccaagacggtaaccaccttcgtatgactgtagtgtgggcacacgagaagtacggaatcgaatcttttgcactgattcacgactccttcggtaccattccggctgacgctgcgaacctgttcaaagcagtgcgcgaaactttcgttgacacatatgagtcttgtgatgtactggctgatttctacgaccagttcgctgaccagttgcacgagtctcaacgcgacaaaatgccagcacttccggctaaaggtaacttgaacctccgtgacatcttaaaatcggacttcgcgttcgcg

SEQ ID NO: 1386 - protein, 890 aa, synthetic construct
  REGION 1..890: note = Variant of RNA polymerase
MHHHHHHMNTINIAKNDFSDIELAAIPFNTLADHYGERLAREQLALEHESYEMGEARFRKMFERQLKAGEVADNAAAKPLITTLLPKMIARINDWFEEVKAKRGKRPTAFQFLQEIKPEAVAYITIKTTLACQTSADNTTVQAVASAIGRAIEDEARFGRIRDLEAKHFKKNVEEQLNKRVGHVYKKAFMQVVEHDMLSKGLLGGEAWSSWHKEDSIHVGVRCIEMLIESTGMVSLHRQNAGVVGQDSETIELAPEYAEAIATRAGALAGISPMFQPCVVPPKPWTGITGGGYWAAGRKPLQLVRTRSLAALRRYEEVSMPEVIKAVNIAQNTAWRINKKVLDVANTITQWQHCPVADVPAMDRGEMPARPLDIDTNEIALKAWKKEASAFYRKDKARVSRRLSMEFMLSQANKFANYEAIWFPQNMDWRGRVYAVPMFNPQGNDMTKGLLTFAQEKPIGEDGFYWLKIHGANTAGVDKVPFPQRIKFVEDNHTNIMECAKAPLENTWWAEQDSPFCFLAFCFEYAGVINSGLSYNCSLPLAFDGSCSGLQHFSAMLRDEIGGKAVNLLPSAEYQDIYRIVSDKVNEMLKQDLINGTSTTVETVTDKKTGEITQRTKYGTKVMAQWWLEHGVNRGVTKRSVMTLVYGSKEFGFRDQVLSDTIQPAIDNGKGDMFLNPNQAAGYMAKLIWNAVSGTVVAAVEAMNWLKSAAKLLAAEVKDPKTDTVLRGRCAVHWVTPDGFPVWQEYKKPIQTRLNLMFLGQFRLQPTINTNKDSEIDAHKQESGIAPNFVHSQDGNHLRMTVVWAHEKYGIESFALIHDSFGTIPADAANLFKAVRETFVDTYESCDVLADFYDQFADQLHESQRDKMPALPAKGNLNLRDILKSDFAFA

SEQ ID NO: 1387 - DNA, 2670 bp, synthetic construct
  misc_feature 1..2670: note = Variant of RNA polymerase
  source 1..2670: mol_type = other DNA
atgcaccatcaccatcaccatatgaacacgattaacattgctaagaacgacttctctgacatcgaactggctgctatcccgttcaacactctggctgaccattacggtgagcgtttagctcgcgaacagttggcccttgagcatgagtcttacgagatgggtgaagcacgcttccgcaagatgtttgagcgtcaacttaaagctggtgaggttgcggataacgctgccgccaagcctctcatcactaccctactccctaagatgattgcacgcatcaacgactggtttgaggaagtgaaagctaagcgcggcaagcgcccgacagccttccagttcctgcaagaaatcaagccggaagccgtagcgtacatcaccattaagaccactctggcttgcctaaccagtgcggacaatacaaccgttcaggctgtagcaagcgcaatcggtcgggccattgaggacgaggctcgcttcggtcgtatccgtgaccttgaagctaagcacttcaagaagaacgttgaggaacaactcaacaagcgcgtagggcacgtctacaagaaagcatttatgcaagttgtcgagcacgacatgctctctaagggtctactcggtggcgaggcgtggtcttcgtggcataaggaagactctattcatgtaggagtacgctgcatcgagatgctcattgagtcaaccggaatggttagcttacaccgccaaaatgctggcgtagtaggtcaagactctgagactatcgaactcgcacctgaatacgctgaggctatcgcaacccgtgcaggtgcgctggctggcatctctccgatgttccaaccttgcgtagttcctcctaagccgtggactggcattactggtggtggctattgggctgcggggcgccgtcccctgcagttagtacgtactcgcagtctggcggcgcttcgccgctatgaagaagtgtcgatgccggaggtcatcaaagcagtcaacattgcgcagaatacagcatggcgtattaacaagaaagttctcgacgtagcgaataccatcacccaatggcagcactgtccagtcgcggatgtgcctgcgatggatcgtggcgaaatgccagctcgtccgttggacatcgataccaacgagattgcacttaaagcgtggaagaaagaagcttccgcgttctaccgcaaagacaaagcacgcgttagccgtcgtctgtcaatggagtttatgttatctcaggcgaacaagtttgcgaattatgaggcaatctggtttccgcaaaacatggattggcgtgggcgcgtgtacgctgtcccgatgttcaatcctcagggcaacgatatgacgaaaggcctgctgacctttgcgcaggagaaacccattggtgaagacggcttctattggctcaagattcatggcgcaaatacagctggagtggataaagtaccgtttccacaacgcatcaaatttgttgaggataaccatacgaatattatggaatgcgcgaaagcaccgctggaaaacacttggtgggcggaacaggactcgccgttctgttttctggcgttctgctttgagtatgctggcgtcatcaatagtggtctgtcgtacaactgtagcttgcctctggcatttgatggtagttgctccggcctgcaacatttctcagcgatgttacgcgacgaaattggcggcaaagctgtgaatctcctcccatctgcggaataccaggatatttatcgtatcgtcagcgacaaagttaacgagatgctgaaacaagatctgattaacggtacctctaccaccgtggaaacggtgactgataagaagacaggcgaaattacccaacgcacgaaatacgggaccaaagttatggcacagtggtggttagaacacggtgtgaatcgtggcgtcacgaaacgctcggttatgactttggtgtatgggagcaaagagtttggattccgcgatcaagtgctgagtgacaccattcaaccggcgatcgataacggcaaaggtgacatgtttctgaatccgaatcaggctgctggttacatggcgaaactgatctggaacgcagtgtccgggaccgtagtcgcagcagttgaggcgatgaactggctgaaaagtgcggcgaaattacttgctgctgaagtgaaggatcctaagacggatacagttctgcgtggccgctgcgcagtacattgggtgactcccgacggcttccctgtgtggcaggaatacaagaagcctattcagacgcgcttgaacctgatgttcctcggtcagttccgcttacagcctaccattaacaccaacaaagatagcgagattgatgcacacaaacaggagtctggtatcgctcctaactttgtacacagccaagacggtaaccaccttcgtatgactgtagtgtgggcacacgagaagtacggaatcgaatcttttgcactgattcacgactccttcggtaccattccggctgacgctgcgaacctgttcaaagcagtgcgcgaaactttcgttgacacatatgagtcttgtgatgtactggctgatttctacgaccagttcgctgaccagttgcacgagtctcaacgcgacaaaatgccagcacttccggctaaaggtaacttgaacctccgtgacatcttaaaatcggacttcgcgttcgcg

SEQ ID NO: 1388 - protein, 890 aa, synthetic construct
  REGION 1..890: note = Variant of RNA polymerase
MHHHHHHMNTINIAKNDFSDIELAAIPFNTLADHYGERLAREQLALEHESYEMGEARFRKMFERQLKAGEVADNAAAKPLITTLLPKMIARINDWFEEVKAKRGKRPTAFQFLQEIKPEAVAYITIKTTLACLTSADNTTVQAVASAIGRAIEDEARFGRIRDLEAKHFKKNVEEQLNKRVGHVYKKAFMQVVEHDMLSKGLLGGEAWSSWHKEDSIHVGVRCIEMLIESTGMVSLHRQNAGVVGQDSETIELAPEYAEAIATRAGALAGISPMFQPCVVPPKPWTGITGGGYWAAGRRPLQLVRTRSLAALRRYEEVSMPEVIKAVNIAQNTAWRINKKVLDVANTITQWQHCPVADVPAMDRGEMPARPLDIDTNEIALKAWKKEASAFYRKDKARVSRRLSMEFMLSQANKFANYEAIWFPQNMDWRGRVYAVPMFNPQGNDMTKGLLTFAQEKPIGEDGFYWLKIHGANTAGVDKVPFPQRIKFVEDNHTNIMECAKAPLENTWWAEQDSPFCFLAFCFEYAGVINSGLSYNCSLPLAFDGSCSGLQHFSAMLRDEIGGKAVNLLPSAEYQDIYRIVSDKVNEMLKQDLINGTSTTVETVTDKKTGEITQRTKYGTKVMAQWWLEHGVNRGVTKRSVMTLVYGSKEFGFRDQVLSDTIQPAIDNGKGDMFLNPNQAAGYMAKLIWNAVSGTVVAAVEAMNWLKSAAKLLAAEVKDPKTDTVLRGRCAVHWVTPDGFPVWQEYKKPIQTRLNLMFLGQFRLQPTINTNKDSEIDAHKQESGIAPNFVHSQDGNHLRMTVVWAHEKYGIESFALIHDSFGTIPADAANLFKAVRETFVDTYESCDVLADFYDQFADQLHESQRDKMPALPAKGNLNLRDILKSDFAFA

SEQ ID NO: 1389 - DNA, 2670 bp, synthetic construct
  misc_feature 1..2670: note = Variant of RNA polymerase
  source 1..2670: mol_type = other DNA
atgcaccatcaccatcaccatatgaacacgattaacattgctaagaacgacttctctgacatcgaactggctgctatcccgttcaacactctggctgaccattacggtgagcgtttagctcgcgaacagttggcccttgagcatgagtcttacgagatgggtgaagcacgcttccgcaagatgtttgagcgtcaacttaaagctggtgaggttgcggataacgctgccgccaagcctctcatcactaccctactccctaagatgattgcacgcatcaacgactggtttgaggaagtgaaagctaagcgcggcaagcgcccgacagccttccagttcctgcaagaaatcaagccggaagccgtagcgtacatcaccattaagaccactctggcttgcctaaccagtgcggacaatacaaccgttcaggctgtagcaagcgcaatcggtcgggccattgaggacgaggctcgcttcggtcgtatccgtgaccttgaagctaagcacttcaagaagaacgttgaggaacaactcaacaagcgcgtagggcacgtctacaagaaagcatttatgcaagttgtcgagcacgacatgctctctaagggtctactcggtggcgaggcgtggtcttcgtggcataaggaagactctattcatgtaggagtacgctgcatcgagatgctcattgagtcaaccggaatggttagcttacaccgccaaaatgctggcgtagtaggtcaagactctgagactatcgaactcgcacctgaatacgctgaggctatcgcaacccgtgcaggtgcgctggctggcatctctccgatgttccaaccttgcgtagttcctcctaagccgtggactggcattactggtggtggctattgggctgcggggcgcaaacccctgcagttagtacgtactcgcagtctggcggcgcttcgccgctatgaagaagtgtcgatgccggaggtcatcaaagcagtcaacattgcgcagaatacagcatggcgtattaacaagaaagttctcgacgtagcgaataccatcacccaatggcagcactgtccagtcgcggatgtgcctgcgatggatcgtggcgaaatgccagctcgtccgttggacatcgataccaacgagattgcacttaaagcgtggaagaaagaagcttccgcgttctaccgcaaagacaaagcacgcgttagccgtcgtctgtcaatggagtttatgttatctcaggcgaacaagtttgcgaattatgaggcaatctggtttccgcaaaacatggattggcgtgggcgcgtgtacgctgtcccgatgttcaatcctcagggcaacgatatgacgaaaggcctgctgacctttgcgcaggagaaacccattggtgaagacggcttctattggctcaagattcatggcgcaaatacagctggagtggataaagtaccgtttccacaacgcatcaaatttgttgaggataaccatacgaatattatggaatgcgcgaaagcaccgctggaaaacacttggtgggcggaacaggactcgccgttctgttttctggcgttctgctttgagtatgctggcgtcatcaatagtggtctgtcgtacaactgtagcttgcctctggcatttgatggtagttgctccggcctgcaacatttctcagcgatgttacgcgacgaaattggcggcaaagctgtgaatctcctcccatctgcggaataccaggatatttatcgtatcgtcagcgacaaagttaacgagatgctgaaacaagatctgattaacggtacctctaccaccgtggaaacggtgactgataagaagacaggcgaaattacccaacgcacgaaatacgggaccaaagttatggcacagtggtggttagaacacggtgtgaatcgtggcgtcacgaaacgctcggttatgactttggtgtatgggagcaaagagtttggattccgcgatcaagtgctgagtgacaccattcaaccggcgatcgataacggcaaaggtgacatgtttacgaatccgaatcaggctgctggttacatggcgaaactgatctggaacgcagtgtccgggaccgtagtcgcagcagttgaggcgatgaactggctgaaaagtgcggcgaaattacttgctgctgaagtgaaggatcctaagacggatacagttctgcgtggccgctgcgcagtacattgggtgactcccgacggcttccctgtgtggcaggaatacaagaagcctattcagacgcgcttgaacctgatgttcctcggtcagttccgcttacagcctaccattaacaccaacaaagatagcgagattgatgcacacaaacaggagtctggtatcgctcctaactttgtacacagccaagacggtaaccaccttcgtatgactgtagtgtgggcacacgagaagtacggaatcgaatcttttgcactgattcacgactccttcggtaccattccggctgacgctgcgaacctgttcaaagcagtgcgcgaaactttcgttgacacatatgagtcttgtgatgtactggctgatttctacgaccagttcgctgaccagttgcacgagtctcaacgcgacaaaatgccagcacttccggctaaaggtaacttgaacctccgtgacatcttaaaatcggacttcgcgttcgcg

SEQ ID NO: 1390 - protein, 890 aa, synthetic construct
  REGION 1..890: note = Variant of RNA polymerase
MHHHHHHMNTINIAKNDFSDIELAAIPFNTLADHYGERLAREQLALEHESYEMGEARFRKMFERQLKAGEVADNAAAKPLITTLLPKMIARINDWFEEVKAKRGKRPTAFQFLQEIKPEAVAYITIKTTLACLTSADNTTVQAVASAIGRAIEDEARFGRIRDLEAKHFKKNVEEQLNKRVGHVYKKAFMQVVEHDMLSKGLLGGEAWSSWHKEDSIHVGVRCIEMLIESTGMVSLHRQNAGVVGQDSETIELAPEYAEAIATRAGALAGISPMFQPCVVPPKPWTGITGGGYWAAGRKPLQLVRTRSLAALRRYEEVSMPEVIKAVNIAQNTAWRINKKVLDVANTITQWQHCPVADVPAMDRGEMPARPLDIDTNEIALKAWKKEASAFYRKDKARVSRRLSMEFMLSQANKFANYEAIWFPQNMDWRGRVYAVPMFNPQGNDMTKGLLTFAQEKPIGEDGFYWLKIHGANTAGVDKVPFPQRIKFVEDNHTNIMECAKAPLENTWWAEQDSPFCFLAFCFEYAGVINSGLSYNCSLPLAFDGSCSGLQHFSAMLRDEIGGKAVNLLPSAEYQDIYRIVSDKVNEMLKQDLINGTSTTVETVTDKKTGEITQRTKYGTKVMAQWWLEHGVNRGVTKRSVMTLVYGSKEFGFRDQVLSDTIQPAIDNGKGDMFTNPNQAAGYMAKLIWNAVSGTVVAAVEAMNWLKSAAKLLAAEVKDPKTDTVLRGRCAVHWVTPDGFPVWQEYKKPIQTRLNLMFLGQFRLQPTINTNKDSEIDAHKQESGIAPNFVHSQDGNHLRMTVVWAHEKYGIESFALIHDSFGTIPADAANLFKAVRETFVDTYESCDVLADFYDQFADQLHESQRDKMPALPAKGNLNLRDILKSDFAFA

SEQ ID NO: 1391 - DNA, 2670 bp, synthetic construct
  misc_feature 1..2670: note = Variant of RNA polymerase
  source 1..2670: mol_type = other DNA
atgcaccatcaccatcaccatatgaacacgattaacattgctaagaacgacttctctgacatcgaactggctgctatcccgttcaacactctggctgaccattacggtgagcgtttagctcgcgaacagttggcccttgagcatgagtcttacgagatgggtgaagcacgcttccgcaagatgtttgagcgtcaacttaaagctggtgaggttgcggataacgctgccgccaagcctctcatcactaccctactccctaagatgattgcacgcatcaacgactggtttgaggaagtgaaagctaagcgcggcaagcgcccgacagccttccagttcctgcaagaaatcaagccggaagccgtagcgtacatcaccattaagaccactctggcttgcctaaccagtgcggacaatacaaccgttcaggctgtagcaagcgcaatcggtcgggccattgaggacgaggctcgcttcggtcgtatccgtgaccttgaagctaagcacttcaagaagaacgttgaggaacaactcaacaagcgcgtagggcacgtctacaagaaagcatttatgcaagttgtcgagcacgacatgctctctaagggtctactcggtggcgaggcgtggtcttcgtggcataaggaagactctattcatgtaggagtacgctgcatcgagatgctcattgagtcaaccggaatggttagcttacaccgccaaaatgctggcgtagtaggtcaagactctgagactatcgaactcgcacctgaatacgctgaggctatcgcaacccgtgcaggtgcgctggctggcatctctccgatgttccaaccttgcgtagttcctcctaagccgtggactggcattactggtggtggctattgggctgcggggcgcaaacccctgcagttagtacgtactcgcagtctggcggcgcttcgccgctatgaagaagtgtcgatgccggaggtcatcaaagcagtcaacattgcgcagaatacagcatggcgtattaacaagaaagttctcgacgtagcgaataccatcacccaatggcagcactgtccagtcgcggatgtgcctgcgatggatcgcggcgaaatgccagctcgtccgttggacatcgataccaacgagattgcacttaaagcgtggaagaaagaagcttccgcgttctaccgcaaagacaaagcacgcgttagccgtcgtctgtcaatggagtttatgttatctcaggcgaacaagtttgtcaattatgaggcaatctggtttccgcaaaacatggattggcgtgggcgcgtgtacgctgtcccgatgttcaatcctcagggcaacgatatgacgaaaggcctgctgacctttgcgcaggagaaacccattggtgaagacggcttctattggctcaagattcatggcgcaaatacagctggagtggataaagtaccgtttccacaacgcatcaaatttgttgaggataaccatacgaatattatggaatgcgcgaaagcaccgctggaaaacacttggtgggcggaacaggactcgccgttctgttttctggcgttctgctttgagtatgctggcgtcatcaatagtggtctgtcgtacaactgtagcttgcctctggcatttgatggtagttgctccggcctgcaacatttctcagcgatgttacgcgacgaaattggcggcaaagctgtgaatctcctcccatctgcggaataccaggatatttatcgtatcgtcagcgacaaagttaacgagatgctgaaacaagatctgattaacggtacctctaccaccgtggaaacggtgactgataagaagacaggcgaaattacccaacgcacgaaatacgggaccaaagttatggcacagtggtggttagaacacggtgtgaatcgtggcgtcacgaaacgctcggttatgactttggtgtatgggagcaaagagtttggattccgcgatcaagtgctgagtgacaccattcaaccggcgatcgataacggcaaaggtgacatgtttctgaatccgaatcaggctgctggttacatggcgaaactgatctggaacgcagtgtccgggaccgtagtcgcagcagttgaggcgatgaactggctgaaaagtgcggcgaaattacttgctgctgaagtgaaggatcctaagacggatacagttctgcgtggccgctgcgcagtacattgggtgactcccgacggcttccctgtgtggcaggaatacaagaagcctattcagacgcgcttgaacctgatgttcctcggtcagttccgcttacagcctaccattaacaccaacaaagatagcgagattgatgcacacaaacaggagtctggtatcgctcctaactttgtacacagccaagacggtaaccaccttcgtatgactgtagtgtgggcacacgagaagtacggaatcgaatcttttgcactgattcacgactccttcggtaccattccggctgacgctgcgaacctgttcaaagcagtgcgcgaaactttcgttgacacatatgagtcttgtgatgtactggctgatttctacgaccagttcgctgaccagttgcacgagtctcaacgcgacaaaatgccagcacttccggctaaaggtaacttgaacctccgtgacatcttaaaatcggacttcgcgttcgcg

SEQ ID NO: 1392 - protein, 890 aa, synthetic construct; identical to SEQ ID NO: 1142
  REGION 1..890: note = Variant of RNA polymerase

SEQ ID NO: 1393 - DNA, 2670 bp, synthetic construct
  misc_feature 1..2670: note = Variant of RNA polymerase
  source 1..2670: mol_type = other DNA
atgcaccatcaccatcaccatatgaacacgattaacattgctaagaacgacttctctgacatcgaactggctgctatcccgttcaacactctggctgaccattacggtgagcgtttagctcgcgaacagttggcccttgagcatgagtcttacgagatgggtgaagcacgcttccgcaagatgtttgagcgtcaacttaaagctggtgaggttgcggataacgctgccgccaagcctctcatcactaccctactccctaagatgattgcacgcatcaacgactggtttgaggaagtgaaagctaagcgcggcaagcgcccgacagccttccagttcctgcaagaaatcaagccggaagccgtagcgtacatcaccattaagaccactctggcttgcctaaccagtgcggacaatacaaccgttcaggctgtagcaagcgcaatcggtcgggccattgaggacgaggctcgcttcggtcgtatccgtgaccttgaagctaagcacttcaagaagaacgttgaggaacaactcaacaagcgcgtagggcacgtctacaagaaagcatttatgcaagttgtcgagcacgacatgctctctaagggtctactcggtggcgaggcgtggtcttcgtggcataaggaagactctattcatgtaggagtacgctgcatcgagatgctcattgagtcaaccggaatggttagcttacaccgccaaaatgctggcgtagtaggtcaagactctgagactatcgaactcgcacctgaatacgctgaggctatcgcaacccgtgcaggtgcgctggctggcatctctccgatgttccaaccttgcgtagttcctcctaagccgtggactggcattactggtggtggctattgggctgcggggcgcaaacccctgcagttagtacgtactcgcagtctggcggcgcttcgccgctatgaagaagtgtcgatgccggaggtcatcaaagcagtcaacattgcgcagaatacagcatggcgtattaacaagaaagttctcgacgtagcgaataccatcacccaatggcagcactgtccagtcgcggatgtgcctgcgatggatcgtggcgaaatgccagctcgtccgttggacatcgataccaacgagattgcacttaaagcgtggaagaaagaagcttccgcgttctaccgcaaagacaaagcacgcgttagccgtcgtctgtcactggagtttatgttatctcaggcgaacaagtttgcgaattatgaggcaatctggtttccgcaaaacatggattggcgtgggcgcgtgtacgctgtcccgatgttcaatcctcagggcaacgatatgacgaaaggcctgctgacctttgcgcaggagaaacccattggtgaagacggcttctattggctcaagattcatggcgcaaatacagctggagtggataaagtaccgtttccacaacgcatcaaatttgttgaggataaccatacgaatattatggaatgcgcgaaagcaccgctggaaaacacttggtgggcggaacaggactcgccgttctgttttctggcgttctgctttgagtatgctggcgtcatcaatagtggtctgtcgtacaactgtagcttgcctctggcatttgatggtagttgctccggcctgcaacatttctcagcgatgttacgcgacgaaattggcggcaaagctgtgaatctcctcccatctgcggaataccaggatatttatcgtatcgtcagcgacaaagttaacgagatgctgaaacaagatctgattaacggtacctctaccaccgtggaaacggtgactgataagaagacaggcgaaattacccaacgcacgaaatacgggaccaaagttatggcacagtggtggttagaacacggtgtgaatcgtggcgtcacgaaacgctcggttatgactttggtgtatgggagcaaagagtttggattccgcgatcaagtgctgagtgacaccattcaaccggcgatcgataacggcaaaggtgacatgtttctgaatccgaatcaggctgctggttacatggcgaaactgatctggaacgcagtgtccgggaccgtagtcgcagcagttgaggcgatgaactggctgaaaagtgcggcgaaattacttgctgctgaagtgaaggatcctaagacggatacagttctgcgtggccgctgcgcagtacattgggtgactcccgacggcttccctgtgtggcaggaatacaagaagcctattcagacgcgcttgaacctgatgttcctcggtcagttccgcttacagcctaccattaacaccaacaaagatagcgagattgatgcacacaaacaggagtctggtatcgctcctaactttgtacacagccaagacggtaaccaccttcgtatgactgtagtgtgggcacacgagaagtacggaatcgaatcttttgcactgattcacgactccttcggtaccattccggctgacgctgcgaacctgttcaaagcagtgcgcgaaactttcgttgacacatatgagtcttgtgatgtactggctgatttctacgaccagttcgctgaccagttgcacgagtctcaacgcgacaaaatgccagcacttccggctaaaggtaacttgaacctccgtgacatcttaaaatcggacttcgcgttcgcg

SEQ ID NO: 1394 - protein, 890 aa, synthetic construct
  REGION 1..890: note = Variant of RNA polymerase
MHHHHHHMNTINIAKNDFSDIELAAIPFNTLADHYGERLAREQLALEHESYEMGEARFRKMFERQLKAGEVADNAAAKPLITTLLPKMIARINDWFEEVKAKRGKRPTAFQFLQEIKPEAVAYITIKTTLACLTSADNTTVQAVASAIGRAIEDEARFGRIRDLEAKHFKKNVEEQLNKRVGHVYKKAFMQVVEHDMLSKGLLGGEAWSSWHKEDSIHVGVRCIEMLIESTGMVSLHRQNAGVVGQDSETIELAPEYAEAIATRAGALAGISPMFQPCVVPPKPWTGITGGGYWAAGRKPLQLVRTRSLAALRRYEEVSMPEVIKAVNIAQNTAWRINKKVLDVANTITQWQHCPVADVPAMDRGEMPARPLDIDTNEIALKAWKKEASAFYRKDKARVSRRLSLEFMLSQANKFANYEAIWFPQNMDWRGRVYAVPMFNPQGNDMTKGLLTFAQEKPIGEDGFYWLKIHGANTAGVDKVPFPQRIKFVEDNHTNIMECAKAPLENTWWAEQDSPFCFLAFCFEYAGVINSGLSYNCSLPLAFDGSCSGLQHFSAMLRDEIGGKAVNLLPSAEYQDIYRIVSDKVNEMLKQDLINGTSTTVETVTDKKTGEITQRTKYGTKVMAQWWLEHGVNRGVTKRSVMTLVYGSKEFGFRDQVLSDTIQPAIDNGKGDMFLNPNQAAGYMAKLIWNAVSGTVVAAVEAMNWLKSAAKLLAAEVKDPKTDTVLRGRCAVHWVTPDGFPVWQEYKKPIQTRLNLMFLGQFRLQPTINTNKDSEIDAHKQESGIAPNFVHSQDGNHLRMTVVWAHEKYGIESFALIHDSFGTIPADAANLFKAVRETFVDTYESCDVLADFYDQFADQLHESQRDKMPALPAKGNLNLRDILKSDFAFA

SEQ ID NO: 1395 - DNA, 2670 bp, synthetic construct
  misc_feature 1..2670: note = Variant of RNA polymerase
  source 1..2670: mol_type = other DNA
atgcaccatcaccatcaccatatgaacacgattaacattgctaagaacgacttctctgacatcgaactggctgctatcccgttcaacactctggctgaccattacggtgagcgtttagctcgcgaacagttggcccttgagcatgagtcttacgagatgggtgaagcacgcttccgcaagatgtttgagcgtcaacttaaagctggtgaggttgcggataacgctgccgccaagcctctcatcactaccctactccctaagatgattgcacgcatcaacgactggtttgaggaagtgaaagctaagcgcggcaagcgcccgacagccttccagttcctgcaagaaatcaagccggaagccgtagcgtacatcaccattaagaccactctggcttgcctaaccagtgcggacaatacaaccgttcaggctgtagcaagcgcaatcggtcgggccattgaggacgaggctcgcttcggtcgtatccgtgaccttgaagctaagcacttcaagaagaacgttgaggaacaactcaacaagcgcgtagggcacgtctacaagaaagcatttatgcaagttgtcgagcacgacatgctctctaagggtctactcggtggcgaggcgtggtcttcgtggcataaggaagactctattcatgtaggagtacgctgcatcgagatgctcattgagtcaaccggaatggttagcttacaccgccaaaatgctggcgtagtaggtcaagactctgagactatcgaactcgcacctgaatacgctgaggctatcgcaacccgtgcaggtgcgctggctggcatctctccgatgttccaaccttgcgtagttcctcctaagccgtggactggcattactggtggtggctattgggctgcggggcgcaaacccctgcagttagtacgtactcgcagtctggcggcgcttcgccgctatgaagaagtgtcgatgccggaggtcatcaaagcagtcaacattgcgcagaatacagcatggcgtattaacaagaaagttctcgacgtagcgaataccatcacccaatggcagcactgtccagtcgcggatgtgcctgcgatggatcgtggcgaaatgccagctcgtccgttggacatcgataccaacgagattgcacttaaagcgtggaagaaagaagcttccgcgttctaccgcaaagacaaagcacgcgttagccgtcgtctgtcaatggagtttatgttatctcaggcgaacaagtttgcgaattatgaggcaatctggtttccgcaaaacatggattggcgtgggcgcgtgtacgctgtcccgatgttcaatcctcagggcaacgatatgacgaaaggcctgctgacctttgcgcaggagaaacccattggtgaagacggcttctattggctcaagattcatggcgcaaatacagctggagtggataaagtaccgtttccacaacgcatcaaatttgttgaggataaccatacgaatattatggaatgcgcgaaagcaccgctggaaaacacttggtgggcggaacaggactcgccgttctgttttctggcgttctgctttgagtatgctggcgtcatcaatagtggtctgtcgtacaactgtagcttgcctctggcatttgatggtagttgctccggcctgcaacatttctcagcgatgttacgcgacgaaattggcggcaaagctgtgaatctcctcccatctgcggaataccaggatatttatcgtatcgtcagcgacaaagttaacgagatgctgaaacaagatgccattaacggtacctctaccaccgtggaaacggtgactgataagaagacaggcgaaattacccaacgcacgaaatacgggaccaaagttatggcacagtggtggttagaacacggtgtgaatcgtggcgtcacgaaacgctcggttatgactttggtgtatgggagcaaagagtttggattccgcgatcaagtgctgagtgacaccattcaaccggcgatcgataacggcaaaggtgacatgtttctgaatccgaatcaggctgctggttacatggcgaaactgatctggaacgcagtgtccgggaccgtagtcgcagcagttgaggcgatgaactggctgaaaagtgcggcgaaattacttgctgctgaagtgaaggatcctaagacggatacagttctgcgtggccgctgcgcagtacattgggtgactcccgacggcttccctgtgtggcaggaatacaagaagcctattcagacgcgcttgaacctgatgttcctcggtcagttccgcttacagcctaccattaacaccaacaaagatagcgagattgatgcacacaaacaggagtctggtatcgctcctaactttgtacacagccaagacggtaaccaccttcgtatgactgtagtgtgggcacacgagaagtacggaatcgaatcttttgcactgattcacgactccttcggtaccattccggctgacgctgcgaacctgttcaaagcagtgcgcgaaactttcgttgacacatatgagtcttgtgatgtactggctgatttctacgaccagttcgctgaccagttgcacgagtctcaacgcgacaaaatgccagcacttccggctaaaggtaacttgaacctccgtgacatcttaaaatcggacttcgcgttcgcg

SEQ ID NO: 1396 - protein, 890 aa, synthetic construct
  REGION 1..890: note = Variant of RNA polymerase
MHHHHHHMNTINIAKNDFSDIELAAIPFNTLADHYGERLAREQLALEHESYEMGEARFRKMFERQLKAGEVADNAAAKPLITTLLPKMIARINDWFEEVKAKRGKRPTAFQFLQEIKPEAVAYITIKTTLACLTSADNTTVQAVASAIGRAIEDEARFGRIRDLEAKHFKKNVEEQLNKRVGHVYKKAFMQVVEHDMLSKGLLGGEAWSSWHKEDSIHVGVRCIEMLIESTGMVSLHRQNAGVVGQDSETIELAPEYAEAIATRAGALAGISPMFQPCVVPPKPWTGITGGGYWAAGRKPLQLVRTRSLAALRRYEEVSMPEVIKAVNIAQNTAWRINKKVLDVANTITQWQHCPVADVPAMDRGEMPARPLDIDTNEIALKAWKKEASAFYRKDKARVSRRLSMEFMLSQANKFANYEAIWFPQNMDWRGRVYAVPMFNPQGNDMTKGLLTFAQEKPIGEDGFYWLKIHGANTAGVDKVPFPQRIKFVEDNHTNIMECAKAPLENTWWAEQDSPFCFLAFCFEYAGVINSGLSYNCSLPLAFDGSCSGLQHFSAMLRDEIGGKAVNLLPSAEYQDIYRIVSDKVNEMLKQDAINGTSTTVETVTDKKTGEITQRTKYGTKVMAQWWLEHGVNRGVTKRSVMTLVYGSKEFGFRDQVLSDTIQPAIDNGKGDMFLNPNQAAGYMAKLIWNAVSGTVVAAVEAMNWLKSAAKLLAAEVKDPKTDTVLRGRCAVHWVTPDGFPVWQEYKKPIQTRLNLMFLGQFRLQPTINTNKDSEIDAHKQESGIAPNFVHSQDGNHLRMTVVWAHEKYGIESFALIHDSFGTIPADAANLFKAVRETFVDTYESCDVLADFYDQFADQLHESQRDKMPALPAKGNLNLRDILKSDFAFA

SEQ ID NO: 1397 - DNA, 2670 bp, synthetic construct
  misc_feature 1..2670: note = Variant of RNA polymerase
  source 1..2670: mol_type = other DNA
atgcaccatcaccatcaccatatgaacacgattaacattgctaagaacgacttctctgacatcgaactggctgctatcccgttcaacactctggctgaccattacggtgagcgtttagctcgcgaacagttggcccttgagcatgagtcttacgagatgggtgaagcacgcttccgcaagatgtttgagcgtcaacttaaagctggtgaggttgcggataacgctgccgccaagcctctcatcactaccctactccctaagatgattgcacgcatcaacgactggtttgaggaagtgaaagctaagcgcggcaagcgcccgacagccttccagttcctgcaagaaatcaagccggaagccgtagcgtacatcaccattaagaccactctggcttgcctaaccagtgcggacaatacaaccgttcaggctgtagcaagcgcaatcggtcgggccattgaggacgaggctcgcttcggtcgtatccgtgaccttgaagctaagcacttcaagaagaacgttgaggaacaactcaacaagcgcgtagggcacgtctacaagaaagcatttatgcaagttgtcgagcacgacatgctctctaagggtctactcggtggcgaggcgtggtcttcgtggcataaggaagactctattcatgtaggagtacgctgcatcgagatgctcattgagtcaaccggaatggttagcttacaccgccaaaatgctggcgtagtaggtcaagactctgagactatcgaactcgcacctgaatacgctgaggctatcgcaacccgtgcaggtgcgctggctggcatctctccgatgttccaaccttgcgtagttcctcctaagccgtggactggcattactggtggtggctattgggctgcggggcgcaaacccctgcagttagtacgtactcgcagtctggcggcgcttcgccgctatgaagaagtgtcgatgccggaggtcatcaaagcagtcaacattgcgcagaatacagcatggcgtattaacaagaaagttctcgacgtagcgaataccatcacccaatggcagcactgtccagtcgcggatgtgcctgcgatggatcgtggcgaaatgccagctcgtccgttggacatcgataccaacgagattgcacttaaagcgtggaagaaagaagcttccgcgttctaccgcaaagacaaagcacgcatgagccgtcgtctgtcgatggagtttatgttatctcaggcgaacaagtttgcgaattatgaggcaatctggtttccgcaaaacatggattggcgtgggcgcgtgtacgctgtcccgatgttcaatcctcagggcaacgatatgacgaaaggcctgctgacctttgcgcaggagaaacccattggtgaagacggcttctattggctcaagattcatggcgcaaatacagctggagtggataaagtaccgtttccacaacgcatcaaatttgttgaggataaccatacgaatattatggaatgcgcgaaagcaccgctggaaaacacttggtgggcggaacaggactcgccgttctgctttctggcgttctgctttgagtatgctggcgtcatcaatagtggtctgtcgtacaactgtagcttgcctctggcatttgatggtagttgctccggcctgcaacatttctcagcgatgttacgcgacgaaattggcggcaaagctgtgaatctcctcccatctgcggaataccaggatatttatcgtatcgtcagcgacaaagttaacgagatgctgaaacaagatctgattaacggtacctctaccaccgtggaaacggtgactgataagaagacaggcgaaattacccaacgcacgaaatacgggaccaaagttatggcacagtggtggttagaacacggtgtgaatcgtggcgtcacgaaacgctcggttatgactttggtgtatgggagcaaagagtttggattccgcgatcaagtgctgagtgacaccattcaaccggcgatcgataacggcaaaggtgacatgtttctgaatccgaatcaggctgctggttacatggcgaaactgatctggaacgcagtgtccgggaccgtagtcgcagcagttgaggcgatgaactggctgaaaagtgcggcgaaattacttgctgctgaagtgaaggatcctaagacggatacagttctgcgtggccgctgcgcagtacattgggtgactcccgacggcttccctgtgtggcaggaatacaagaagcctattcaaacgcgcttgaacctgatgttcctcggtcagttccgcttacagcctaccattaacaccaacaaagatagcgagattgatgcacacaaacaggagtctggtatcgctcctaactttgtacacagccaagacggtaaccaccttcgtatgactgtagtgtgggcacacgagaagtacggaatcgaatcttttgcactgattcacgactccttcggtaccattccggctgacgctgcgaacctgttcaaagcagtgcgcgaaactttcgttgacacatatgagtcttgtgatgtactggctgatttctacgaccagttcgctgaccagttgcacgagtctcaacgcgacaaaatgccagcacttccggctaaaggtaacttgaacctccgtgacatcttaaaatcggacttcgcgttcgcg

SEQ ID NO: 1398 - protein, 890 aa, synthetic construct
  REGION 1..890: note = Variant of RNA polymerase
MHHHHHHMNTINIAKNDFSDIELAAIPFNTLADHYGERLAREQLALEHESYEMGEARFRKMFERQLKAGEVADNAAAKPLITTLLPKMIARINDWFEEVKAKRGKRPTAFQFLQEIKPEAVAYITIKTTLACLTSADNTTVQAVASAIGRAIEDEARFGRIRDLEAKHFKKNVEEQLNKRVGHVYKKAFMQVVEHDMLSKGLLGGEAWSSWHKEDSIHVGVRCIEMLIESTGMVSLHRQNAGVVGQDSETIELAPEYAEAIATRAGALAGISPMFQPCVVPPKPWTGITGGGYWAAGRKPLQLVRTRSLAALRRYEEVSMPEVIKAVNIAQNTAWRINKKVLDVANTITQWQHCPVADVPAMDRGEMPARPLDIDTNEIALKAWKKEASAFYRKDKARMSRRLSMEFMLSQANKFANYEAIWFPQNMDWRGRVYAVPMFNPQGNDMTKGLLTFAQEKPIGEDGFYWLKIHGANTAGVDKVPFPQRIKFVEDNHTNIMECAKAPLENTWWAEQDSPFCFLAFCFEYAGVINSGLSYNCSLPLAFDGSCSGLQHFSAMLRDEIGGKAVNLLPSAEYQDIYRIVSDKVNEMLKQDLINGTSTTVETVTDKKTGEITQRTKYGTKVMAQWWLEHGVNRGVTKRSVMTLVYGSKEFGFRDQVLSDTIQPAIDNGKGDMFLNPNQAAGYMAKLIWNAVSGTVVAAVEAMNWLKSAAKLLAAEVKDPKTDTVLRGRCAVHWVTPDGFPVWQEYKKPIQTRLNLMFLGQFRLQPTINTNKDSEIDAHKQESGIAPNFVHSQDGNHLRMTVVWAHEKYGIESFALIHDSFGTIPADAANLFKAVRETFVDTYESCDVLADFYDQFADQLHESQRDKMPALPAKGNLNLRDILKSDFAFA

SEQ ID NO: 1399 - DNA, 2670 bp, synthetic construct
  misc_feature 1..2670: note = Variant of RNA polymerase
  source 1..2670: mol_type = other DNA
atgcaccatcaccatcaccatatgaacacgattaacattgctaagaacgacttctctgacatcgaactggctgctatcccgttcaacactctggctgaccattacggtgagcgtttagctcgcgaacagttggcccttgagcatgagtcttacgagatgggtgaagcacgcttccgcaagatgtttgagcgtcaacttaaagctggtgaggttgcggataacgctgccgccaagcctctcatcactaccctactccctaagatgattgcacgcatcaacgactggtttgaggaagtgaaagctaagcgcggcaagcgcccgacagccttccagttcctgcaagaaatcaagccggaagccgtagcgtacatcaccattaagaccactctggcttgcctaaccagtgcggacaatacaaccgttcaggctgtagcaagcgcaatcggtcgggccattgaggacgaggctcgcttcggtcgtatccgtgaccttgaagctaagcacttcaagaagaacgttgaggaacaactcaacaagcgcgtagggcacgtctacaagaaagcatttatgcaagttgtcgagcacgacatgctctctaagggtctactcggtggcgaggcgtggtcttcgtggcataaggaagactctattcatgtaggagtacgctgcatcgagatgctcattgagtcaaccggaatggttagcttacaccgccaaaatgctggcgtagtaggtcaagactctgagactatcgaactcgcacctgaatacgctgaggctatcgcaacccgtgcaggtgcgctggctggcatctctccgatgttccaaccttgcgtagttcctcctaagccgtggactggcattactggtggtggctattgggctgcggggcgcaaacccctgcagttagtacgtactcgcagtctggcggcgcttcgccgctatgaagaagtgtcgatgccggaggtcatcaaagcagtcaacattgcgcagaatacagcatggcgtattaacaagaaagttctcgacgtagcgaataccatcacccaatggcagcactgtccagtcgcggatgtgcctgcgatggatcgtggcgaaatgccagctcgtccgttggacatcgataccaacgagattgcacttaaagcgtggaagaaagaagcttccgcgttctaccgcaaagacaaagcacgcgttagccgtcgtctgtcaatggagtttatgttatctcaggcgaacaagtttgcgaattatgaggcaatctggtttccgcaaaacatggattggcgtgggcgcgtgtacgctgtcccgatgttcaatcctcagggcaacgatatgacgaaaggcctgctgacctttgcgcaggagaaacccattggtgaagacggcttctattggctcaagattcatggcgcaaatacagctggagtggataaagtaccgtttccacaacgcatcaaatttgttgaggataaccatacgaatattatggaatgcgcgaaagcaccgctggaaaacacttggtgggcggaacaggactcgccgttctgttttctggcgttctgctttgagtatgctggcgtcatcaatagtggtctgtcgtacaactgtagcttgcctctggcatttgatggtagttgctccggcctgcaacatttctcagcgatgttacgcgacgaaattggcggccgtgctgtgaatctcctcccatctgcggaataccaggatatttatcgtatcgtcagcgacaaagttaacgagatgctgaaacaagatctgattaacggtacctctaccaccgtggaaacggtgactgataagaagacaggcgaaattacccaacgcacgaaatacgggaccaaagttatggcacagtggtggttagaacacggtgtgaatcgtggcgtcacgaaacgctcggttatgactttggtgtatgggagcaaagagtttggattccgcgatcaagtgctgagtgacaccattcaaccggcgatcgataacggcaaaggtgacatgtttctgaatccgaatcaggctgctggttacatggcgaaactgatctggaacgcagtgtccgggaccgtagtcgcagcagttgaggcgatgaactggctgaaaagtgcggcgaaattacttgctgctgaagtgaaggatcctaagacggatacagttctgcgtggccgctgcgcagtacattgggtgactcccgacggcttccctgtgtggcaggaatacaagaagcctattcagacgcgcttgaacctgatgttcctcggtcagttccgcttacagcctaccattaacaccaacaaagatagcgagattgatgcacacaaacaggagtctggtatcgctcctaactttgtacacagccaagacggtaaccaccttcgtatgactgtagtgtgggcacacgagaagtacggaatcgaatcttttgcactgattcacgactccttcggtaccattccggctgacgctgcgaacctgttcaaagcagtgcgcgaaactttcgttgacacatatgagtcttgtgatgtactggctgatttctacgaccagttcgctgaccagttgcacgagtctcaacgcgacaaaatgccagcacttccggctaaaggtaacttgaacctccgtgacatcttaaaatcggacttcgcgttcgcg

SEQ ID NO: 1400 - protein, 890 aa, synthetic construct
  REGION 1..890: note = Variant of RNA polymerase
MHHHHHHMNTINIAKNDFSDIELAAIPFNTLADHYGERLAREQLALEHESYEMGEARFRKMFERQLKAGEVADNAAAKPLITTLLPKMIARINDWFEEVKAKRGKRPTAFQFLQEIKPEAVAYITIKTTLACLTSADNTTVQAVASAIGRAIEDEARFGRIRDLEAKHFKKNVEEQLNKRVGHVYKKAFMQVVEHDMLSKGLLGGEAWSSWHKEDSIHVGVRCIEMLIESTGMVSLHRQNAGVVGQDSETIELAPEYAEAIATRAGALAGISPMFQPCVVPPKPWTGITGGGYWAAGRKPLQLVRTRSLAALRRYEEVSMPEVIKAVNIAQNTAWRINKKVLDVANTITQWQHCPVADVPAMDRGEMPARPLDIDTNEIALKAWKKEASAFYRKDKARVSRRLSMEFMLSQANKFANYEAIWFPQNMDWRGRVYAVPMFNPQGNDMTKGLLTFAQEKPIGEDGFYWLKIHGANTAGVDKVPFPQRIKFVEDNHTNIMECAKAPLENTWWAEQDSPFCFLAFCFEYAGVINSGLSYNCSLPLAFDGSCSGLQHFSAMLRDEIGGRAVNLLPSAEYQDIYRIVSDKVNEMLKQDLINGTSTTVETVTDKKTGEITQRTKYGTKVMAQWWLEHGVNRGVTKRSVMTLVYGSKEFGFRDQVLSDTIQPAIDNGKGDMFLNPNQAAGYMAKLIWNAVSGTVVAAVEAMNWLKSAAKLLAAEVKDPKTDTVLRGRCAVHWVTPDGFPVWQEYKKPIQTRLNLMFLGQFRLQPTINTNKDSEIDAHKQESGIAPNFVHSQDGNHLRMTVVWAHEKYGIESFALIHDSFGTIPADAANLFKAVRETFVDTYESCDVLADFYDQFADQLHESQRDKMPALPAKGNLNLRDILKSDFAFA

SEQ ID NO: 1401 - DNA, 2670 bp, synthetic construct
  misc_feature 1..2670: note = Variant of RNA polymerase
  source 1..2670: mol_type = other DNA
atgcaccatcaccatcaccatatgaacacgattaacattgctaagaacgacttctctgacatcgaactggctgctatcccgttcaacactctggctgaccattacggtgagcgtttagctcgcgaacagttggcccttgagcatgagtcttacgagatgggtgaagcacgcttccgcaagatgtttgagcgtcaacttaaagctggtgaggttgcggataacgctgccgccaagcctctcatcactaccctactccctaagatgattgcacgcatcaacgactggtttgaggaagtgaaagctaagcgcggcaagcgcccgacagccttccagttcctgcaagaaatcaagccggaagccgtagcgtacatcaccattaagaccactctggcttgcctaaccagtgcggacaatacaaccgttcaggctgtagcaagcgcaatcggtcgggccattgaggacgaggctcgcttcggtcgtatccgtgaccttgaagctaagcacttcaagaagaacgttgaggaacaactcaacaagcgcgtagggcacgtctacaagaaagcatttatgcaagttgtcgagcacgacatgctctctaagggtctactcggtggcgaggcgtggtcttcgtggcataaggaagactctattcatgtaggagtacgctgcatcgagatgctcattgagtcaaccggaatggttagcttacaccgccaaaatgctggcgtagtaggtcaagactctgagactatcgaactcgcacctgaatacgctgaggctatcgcaacccgtgcaggtgcgctggctggcatctctccgatgttccaaccttgcgtagttcctcctaagccgtggactggcattactggtggtggctattgggctgcggggcgcaaacccctgcagttagtacgtactcgcagtctggcggcgcttcgccgctatgaagaagtgtcgatgccggaggtcatcaaagcagtcaacattgcgcagaatacagcatggcgtattaacaagaaagttctcgacgtagcgaataccatcacccaatggcagcactgtccagtcgcggatgtgcctgcgatggatcgtggcgaaatgccagctcgtccgttggacatcgataccaacgagattgcacttaaagcgtggaagaaagaagcttccgcgttctaccgcaaagacaaagcacgcgttagccgtcgtctgtcaatggagtttatgttatctcaggcgaacaagtttgcgaattatgaggcaatctggtttccgcaaaacatggattggcgtgggcgcgtgtacgctgtcccgatgttcaatcctcagggcaacgatatgacgaaaggcctgctgacctttgcgcaggagaaacccattggtgaagacggcttctattggctcaagattcatggcgcaaatacagctggagtggataaagtaccgtttccacaacgcatcaaatttgttgaggataaccatacgaatattatggaatgcgcgaaagcaccgctggaaaacacttggtgggcggaacaggactcgccgttctgttttctggcgttctgctttgagtatgctggcgtcatcaatagtggtctgtcgtacaactgtagcttgcctctggcatttgatggtagttgctccggcctgcaacatttctcagcgatgttacgcgacgaaattggcggcaaagctgtgaatctcctcccatctgcggaataccaggatatttatcgtatcgtcagcgacaaagttaacgagatgctgcagcaagatctgattaacggtacctctaccaccgtggaaacggtgactgataagaagacaggcgaaattacccaacgcacgaaatacgggaccaaagttatggcacagtggtggttagaacacggtgtgaatcgtggcgtcacgaaacgctcggttatgactttggtgtatgggagcaaagagtttggattccgcgatcaagtgctgagtgacaccattcaaccggcgatcgataacggcaaaggtgacatgtttctgaatccgaatcaggctgctggttacatggcgaaactgatctggaacgcagtgtccgggaccgtagtcgcagcagttgaggcgatgaactggctgaaaagtgcggcgaaattacttgctgctgaagtgaaggatcctaagacggatacagttctgcgtggccgctgcgcagtacattgggtgactcccgacggcttccctgtgtggcaggaatacaagaagcctattcagacgcgcttgaacctgatgttcctcggtcagttccgcttacagcctaccattaacaccaacaaagatagcgagattgatgcacacaaacaggagtctggtatcgctcctaactttgtacacagccaagacggtaaccaccttcgtatgactgtagtgtgggcacacgagaagtacggaatcgaatcttttgcactgattcacgactccttcggtaccattccggctgacgctgcgaacctgttcaaagcagtgcgcgaaactttcgttgacacatatgagtcttgtgatgtactggctgatttctacgaccagttcgctgaccagttgcacgagtctcaacgcgacaaaatgccagcacttccggctaaaggtaacttgaacctccgtgacatcttaaaatcggacttcgcgttcgcg

SEQ ID NO: 1402 - protein, 890 aa, synthetic construct
  REGION 1..890: note = Variant of RNA polymerase
MHHHHHHMNTINIAKNDFSDIELAAIPFNTLADHYGERLAREQLALEHESYEMGEARFRKMFERQLKAGEVADNAAAKPLITTLLPKMIARINDWFEEVKAKRGKRPTAFQFLQEIKPEAVAYITIKTTLACLTSADNTTVQAVASAIGRAIEDEARFGRIRDLEAKHFKKNVEEQLNKRVGHVYKKAFMQVVEHDMLSKGLLGGEAWSSWHKEDSIHVGVRCIEMLIESTGMVSLHRQNAGVVGQDSETIELAPEYAEAIATRAGALAGISPMFQPCVVPPKPWTGITGGGYWAAGRKPLQLVRTRSLAALRRYEEVSMPEVIKAVNIAQNTAWRINKKVLDVANTITQWQHCPVADVPAMDRGEMPARPLDIDTNEIALKAWKKEASAFYRKDKARVSRRLSMEFMLSQANKFANYEAIWFPQNMDWRGRVYAVPMFNPQGNDMTKGLLTFAQEKPIGEDGFYWLKIHGANTAGVDKVPFPQRIKFVEDNHTNIMECAKAPLENTWWAEQDSPFCFLAFCFEYAGVINSGLSYNCSLPLAFDGSCSGLQHFSAMLRDEIGGKAVNLLPSAEYQDIYRIVSDKVNEMLQQDLINGTSTTVETVTDKKTGEITQRTKYGTKVMAQWWLEHGVNRGVTKRSVMTLVYGSKEFGFRDQVLSDTIQPAIDNGKGDMFLNPNQAAGYMAKLIWNAVSGTVVAAVEAMNWLKSAAKLLAAEVKDPKTDTVLRGRCAVHWVTPDGFPVWQEYKKPIQTRLNLMFLGQFRLQPTINTNKDSEIDAHKQESGIAPNFVHSQDGNHLRMTVVWAHEKYGIESFALIHDSFGTIPADAANLFKAVRETFVDTYESCDVLADFYDQFADQLHESQRDKMPALPAKGNLNLRDILKSDFAFA

SEQ ID NO: 1403 - DNA, 2670 bp, synthetic construct
  misc_feature 1..2670: note = Variant of RNA polymerase
  source 1..2670: mol_type = other DNA
atgcaccatcaccatcaccatatgaacacgattaacattgctaagaacgacttctctgacatcgaactggctgctatcccgttcaacactctggctgaccattacggtgagcgtttagctcgcgaacagttggcccttgagcatgagtcttacgagatgggtgaagcacgcttccgcaagatgtttgagcgtcaacttaaagctggtgaggttgcggataacgctgccgccaagcctctcatcactaccctactccctaagatgattgcacgcatcaacgactggtttgaggaagtgaaagctaagcgcggcaagcgcccgacagccttccagttcctgcaagaaatcaagccggaagccgtagcgtacatcaccattaagaccactctggcttgcctaaccagtgcggacaatacaaccgttcaggctgtagcaagcgcaatcggtcgggccattgaggacgaggctcgcttcggtcgtatccgtgaccttgaagctaagcacttcaagaagaacgttgaggaacaactcaacaagcgcgtagggcacgtctacaagaaagcatttatgcaagttgtcgagcacgacatgctctctaagggtctactcggtggcgaggcgtggtcttcgtggcataaggaagactctattcatgtaggagtacgctgcatcgagatgctcattgagtcaaccggaatggttagcttacaccgccaaaatgctggcgtagtaggtcaagactctgagactatcgaactcgcacctgaatacgctgaggctatcgcaacccgtgcaggtgcgctggctggcatctctccgatgttccaaccttgcgtagttcctcctaagccgtggactggcattactggtggtggctattgggctgcggggcgcaaacccctgcagttagtacgtactcgcagtctggcggcgcttcgccgctatgaagaagtgtcgatgccggaggtcatcaaagcagtcaacattgcgcagaatacagcatggcgtattaacaagaaagttctcgacgtagcgaataccatcacccaatggcagcactgtccagtcgcggatgtgcctgcgatggatcgtggcgaaatgccagctcgtccgttggacatcgataccaacgagattgcacttaaagcgtggaagaaagaagcttccgcgttctaccgcaaagacaaagcacgcgttagccgtcgtctgtcaatggagtttatgttatctcaggcgaacaagtttgcgaattatgaggcaatctggtttccgcaaaacatggattggcgtgggcgcgtgtacgctgtcccgatgttcaatcctcagggcaacgatatgacgaaaggcctgctgacctttgcgcaggagaaacccattggtgaagacggcttctattggctcaagattcatggcgcaaatacagctggagtggataaagtaccgtttccacaacgcatcaaatttgttgaggataaccatacgaatattatggaatgcgcgaaagcaccgctggaaaacacttggtgggcggaacaggactcgccgttccagtttctggcgttctgctttgagtatgctggcgtcatcaatagtggtctgtcgtacaactgtagcttgcctctggcatttgatggtagttgctccggcctgcaacatttctcagcgatgttacgcgacgaaattggcggcaaagctgtgaatctcctcccatctgcggaataccaggatatttatcgtatcgtcagcgacaaagttaacgagatgctgaaacaagatctgattaacggtacctctaccaccgtggaaacggtgactgataagaagacaggcgaaattacccaacgcacgaaatacgggaccaaagttatggcacagtggtggttagaacacggtgtgaatcgtggcgtcacgaaacgctcggttatgactttggtgtatgggagcaaagagtttggattccgcgatcaagtgctgagtgacaccattcaaccggcgatcgataacggcaaaggtgacatgtttctgaatccgaatcaggctgctggttacatggcgaaactgatctggaacgcagtgtccgggaccgtagtcgcagcagttgaggcgatgaactggctgaaaagtgcggcgaaattacttgctgctgaagtgaaggatcctaagacggatacagttctgcgtggccgctgcgcagtacattgggtgactcccgacggcttccctgtgtggcaggaatacaagaagcctattcagacgcgcttgaacctgatgttcctcggtcagttccgcttacagcctaccattaacaccaacaaagatagcgagattgatgcacacaaacaggagtctggtatcgctcctaactttgtacacagccaagacggtaaccaccttcgtatgactgtagtgtgggcacacgagaagtacggaatcgaatcttttgcactgattcacgactccttcggtaccattccggctgacgctgcgaacctgttcaaagcagtgcgcgaaactttcgttgacacatatgagtcttgtgatgtactggctgatttctacgaccagttcgctgaccagttgcacgagtctcaacgcgacaaaatgccagcacttccggctaaaggtaacttgaacctccgtgacatcttaaaatcggacttcgcgttcgcg

SEQ ID NO: 1404 - protein, 890 aa, synthetic construct
  REGION 1..890: note = Variant of RNA polymerase
MHHHHHHMNTINIAKNDFSDIELAAIPFNTLADHYGERLAREQLALEHESYEMGEARFRKMFERQLKAGEVADNAAAKPLITTLLPKMIARINDWFEEVKAKRGKRPTAFQFLQEIKPEAVAYITIKTTLACLTSADNTTVQAVASAIGRAIEDEARFGRIRDLEAKHFKKNVEEQLNKRVGHVYKKAFMQVVEHDMLSKGLLGGEAWSSWHKEDSIHVGVRCIEMLIESTGMVSLHRQNAGVVGQDSETIELAPEYAEAIATRAGALAGISPMFQPCVVPPKPWTGITGGGYWAAGRKPLQLVRTRSLAALRRYEEVSMPEVIKAVNIAQNTAWRINKKVLDVANTITQWQHCPVADVPAMDRGEMPARPLDIDTNEIALKAWKKEASAFYRKDKARVSRRLSMEFMLSQANKFANYEAIWFPQNMDWRGRVYAVPMFNPQGNDMTKGLLTFAQEKPIGEDGFYWLKIHGANTAGVDKVPFPQRIKFVEDNHTNIMECAKAPLENTWWAEQDSPFQFLAFCFEYAGVINSGLSYNCSLPLAFDGSCSGLQHFSAMLRDEIGGKAVNLLPSAEYQDIYRIVSDKVNEMLKQDLINGTSTTVETVTDKKTGEITQRTKYGTKVMAQWWLEHGVNRGVTKRSVMTLVYGSKEFGFRDQVLSDTIQPAIDNGKGDMFLNPNQAAGYMAKLIWNAVSGTVVAAVEAMNWLKSAAKLLAAEVKDPKTDTVLRGRCAVHWVTPDGFPVWQEYKKPIQTRLNLMFLGQFRLQPTINTNKDSEIDAHKQESGIAPNFVHSQDGNHLRMTVVWAHEKYGIESFALIHDSFGTIPADAANLFKAVRETFVDTYESCDVLADFYDQFADQLHESQRDKMPALPAKGNLNLRDILKSDFAFA

SEQ ID NO: 1405 - DNA, 2670 bp, synthetic construct
  misc_feature 1..2670: note = Variant of RNA polymerase
  source 1..2670: mol_type = other DNA
atgcaccatcaccatcaccatatgaacacgattaacattgctaagaacgacttctctgacatcgaactggctgctatcccgttcaacactctggctgaccattacggtgagcgtttagctcgcgaacagttggcccttgagcatgagtcttacgagatgggtgaagcacgcttccgcaagatgtttgagcgtcaacttaaagctggtgaggttgcggataacgctgccgccaagcctctcatcactaccctactccctaagatgattgcacgcatcaacgactggtttgaggaagtgaaagctaagcgcggcaagcgcccgacagccttccagttcctgcaagaaatcaagccggaagccgtagcgtacatcaccattaagaccactctggcttgcctaaccagtgcggacaatacaaccgttcaggctgtagcaagcgcaatcggtcgggccattgaggacgaggctcgcttcggtcgtatccgtgaccttgaagctaagcacttcaagaagaacgttgaggaacaactcaacaagcgcgtagggcacgtctacaagaaagcatttatgcaagttgtcgagcacgacatgctctctaagggtctactcggtggcgaggcgtggtcttcgtggcataaggaagactctattcatgtaggagtacgctgcatcgagatgctcattgagtcaaccggaatggttagcttacaccgccaaaatgctggcgtagtaggtcaagactctgagactatcgaactcgcacctgaatacgctgaggctatcgcaacccgtgcaggtgcgctggctggcatctctccgatgttccaaccttgcgtagttcctcctaagccgtggactggcattactggtggtggctattgggctgcggggcgcaaacccctgcagttagtacgtactcgcagtctggcggcgcttcgccgctatgaagaagtgtcgatgccggaggtcatcaaagcagtcaacattgcgcagaatacagcatggcgtattaacaagaaagttctcgacgtagcgaataccatcacccaatggcagcactgtccagtcgcggatgtgcctgcgatggatcgtggcgaaatgccagctcgtccgttggacatcgataccaacgagattgcacttaaagcgtggaagaaagaagcttccgcgttctaccgcaaagacaaagcacgcgttagccgtcgtctgtcaatggagtttatgttatctcaggcgaacaagtttgcgaattatgaggcaatctggtttccgcaaaacatggattggcgtgggcgcgtgtacgctgtcccgatgttcaatcctcagggcaacgatatgacgaaaggcctgctgacctttgcgcaggagaaacccattggtgaagacggcttctattggctcaagattcatggcgcaaatacagctggagtggataaagtaccgtttccacaacgcatcaaatttgttgaggataaccatacgaatattatggaatgcgcgaaagcaccgctggaaaacacttggtgggcggaacaggactcgccgttctgttttctggcgttctgctttgagtatgctggcgtcatcaatagtggtctgtcgtacaactgtagcttgcctctggcatttgatggtagttgctccggcctgcaacatttctcagcgatgttacgcgacgaaattggcggcaaagctgtgaatctcctcccatctgcggaataccaggatatttatcgtatcgtcagcgacaaagttaacgagatgctgaaacaagatctgattaacggtacctctaccaccgtggaaacggtgactgataagaagacaggcgaaattacccaacgcacgaaatacgggaccaaagctatggcacagtggtggttagaacacggtgtgaatcgtggcgtcacgaaacgctcggttatgactttggtgtatgggagcaaagagtttggattccgcgatcaagtgctgagtgacaccattcaaccggcgatcgataacggcaaaggtgacatgtttctgaatccgaatcaggctgctggttacatggcgaaactgatctggaacgcagtgtccgggaccgtagtcgcagcagttgaggcgatgaactggctgaaaagtgcggcgaaattacttgctgctgaagtgaaggatcctaagacggatacagttctgcgtggccgctgcgcagtacattgggtgactcccgacggcttccctgtgtggcaggaatacaagaagcctattcagacgcgcttgaacctgatgttcctcggtcagttccgcttacagcctaccattaacaccaacaaagatagcgagattgatgcacacaaacaggagtctggtatcgctcctaactttgtacacagccaagacggtaaccaccttcgtatgactgtagtgtgggcacacgagaagtacggaatcgaatcttttgcactgattcacgactccttcggtaccattccggctgacgctgcgaacctgttcaaagcagtgcgcgaaactttcgttgacacatatgagtcttgtgatgtactggctgatttctacgaccagttcgctgaccagttgcacgagtctcaacgcgacaaaatgccagcacttccggctaaaggtaacttgaacctccgtgacatcttaaaatcggacttcgcgttcgcg

SEQ ID NO: 1406 - protein, 890 aa, synthetic construct
  REGION 1..890: note = Variant of RNA polymerase
MHHHHHHMNTINIAKNDFSDIELAAIPFNTLADHYGERLAREQLALEHESYEMGEARFRKMFERQLKAGEVADNAAAKPLITTLLPKMIARINDWFEEVKAKRGKRPTAFQFLQEIKPEAVAYITIKTTLACLTSADNTTVQAVASAIGRAIEDEARFGRIRDLEAKHFKKNVEEQLNKRVGHVYKKAFMQVVEHDMLSKGLLGGEAWSSWHKEDSIHVGVRCIEMLIESTGMVSLHRQNAGVVGQDSETIELAPEYAEAIATRAGALAGISPMFQPCVVPPKPWTGITGGGYWAAGRKPLQLVRTRSLAALRRYEEVSMPEVIKAVNIAQNTAWRINKKVLDVANTITQWQHCPVADVPAMDRGEMPARPLDIDTNEIALKAWKKEASAFYRKDKARVSRRLSMEFMLSQANKFANYEAIWFPQNMDWRGRVYAVPMFNPQGNDMTKGLLTFAQEKPIGEDGFYWLKIHGANTAGVDKVPFPQRIKFVEDNHTNIMECAKAPLENTWWAEQDSPFCFLAFCFEYAGVINSGLSYNCSLPLAFDGSCSGLQHFSAMLRDEIGGKAVNLLPSAEYQDIYRIVSDKVNEMLKQDLINGTSTTVETVTDKKTGEITQRTKYGTKAMAQWWLEHGVNRGVTKRSVMTLVYGSKEFGFRDQVLSDTIQPAIDNGKGDMFLNPNQAAGYMAKLIWNAVSGTVVAAVEAMNWLKSAAKLLAAEVKDPKTDTVLRGRCAVHWVTPDGFPVWQEYKKPIQTRLNLMFLGQFRLQPTINTNKDSEIDAHKQESGIAPNFVHSQDGNHLRMTVVWAHEKYGIESFALIHDSFGTIPADAANLFKAVRETFVDTYESCDVLADFYDQFADQLHESQRDKMPALPAKGNLNLRDILKSDFAFA

SEQ ID NO: 1407 - DNA, 2670 bp, synthetic construct
  misc_feature 1..2670: note = Variant of RNA polymerase
  source 1..2670: mol_type = other DNA
atgcaccatcaccatcaccatatgaacacgattaacattgctaagaacgacttctctgacatcgaactggctgctatcccgttcaacactctggctgaccattacggtgagcgtttagctcgcgaacagttggcccttgagcatgagtcttacgagatgggtgaagcacgcttccgcaagatgtttgagcgtcaacttaaagctggtgaggttgcggataacgctgccgccaagcctctcatcactaccctactccctaagatgattgcacgcatcaacgactggtttgaggaagtgaaagctaagcgcggcaagcgcccgacagccttccagttcctgcaagaaatcaagccggaagccgtagcgtacatcaccattaagaccactctggcttgcctaaccagtgcggacaatacaaccgttcaggctgtagcaagcgcaatcggtcgggccattgaggacgaggctcgcttcggtcgtatccgtgaccttgaagctaagcacttcaagaagaacgttgaggaacaactcaacaagcgcgtagggcacgtctacaagaaagcatttatgcaagttgtcgagcacgacatgctctctaagggtctactcggtggcgaggcgtggtcttcgtggcataaggaagactctattcatgtaggagtacgctgcatcgagatgctcattgagtcaaccggaatggttagcttacaccgccaaaatgctggcgtagtgggtgcagactctgagactatcgaactcgcacctgaatacgctgaggctatcgcaacccgtgcaggtgcgctggctggcatctctccgatgttccaaccttgcgtagttcctcctaagccgtggactggcattactggtggtggctattgggctgcggggcgcaaacccctgcagttagtacgtactcgcagtctggcggcgcttcgccgctatgaagaagtgtcgatgccggaggtcatcaaagcagtcaacattgcgcagaatacagcatggcgtattaacaagaaagttctcgacgtagcgaataccatcacccaatggcagcactgtccagtcgcggatgtgcctgcgatggatcacggcgaaatgccagctcgtccgttggacatcgataccaacgagattgcacttaaagcgtggaagaaagaagcttccgcgttctaccgcaaagacaaagcacgcgttagccgtcgtctgtcaatggagtttatgttatctcaggcgaacaagtttgcgaattatgaggcaatctggtttccgcaaaacatggattggcgtgggcgcgtgtacgctgtcccgatgttcaatcctcagggcaacgatatgacgaaaggcctgctgacctttgcgcaggagaaacccattggtgaagacggcttctattggctcaagattcatggcgcaaatacagctggagtggataaagtaccgtttccacaacgcatcaaatttgttgaggataaccatacgaatattatggaatgcgcgaaagcaccgctggaaaacacttggtgggcggaacaggactcgccgttctgttttctggcgttctgctttgagtatgctggcgtcatcaatagtggtctgtcgtacaactgtagcttgcctctggcatttgatggtagttgctccggcctgcaacatttctcagcgatgttacgcgacgaaattggcggcaaagctgtgaatctcctcccatctgcggaataccaggatatttatcgtatcgtcagcgacaaagttaacgagatgctgaaacaagatctgattaacggtacctctaccaccgtggaaacggtgactgataagaagacaggcgaaattacccaacgcacgaaatacgggaccaaagttatggcacagtggtggttagaacacggtgtgaatcgtggcgtcacgaaacgctcggttatgactttggtgtatgggagcaaagagtttggattccgcgatcaagtgctgagtgacaccattcaaccggcgatcgataacggcaaaggtgacatgtttctgaatccgaatcaggctgctggttacatggcgaaactgatctggaacgcagtgtccgggaccgtagtcgcagcagttgaggcgatgaactggctgaaaagtgcggcgaaattacttgctgctgaagtgaaggatcctaagacggatacagttctgcgtggccgctgcgcagtacattgggtgactcccgacggcttccctgtgtggcaggaatacaagaagcctattcagacgcgcttgaacctgatgttcctcggtcagttccgcttacagcctaccattaacaccaacaaagatagcgagattgatgcacacaaacaggagtctggtatcgctcctaactttgtacacagccaagacggtaaccaccttcgtatgactgtagtgtgggcacacgagaagtacggaatcgaatcttttgcactgattcacgactccttcggtaccattccggctgacgctgcgaacctgttcaaagcagtgcgcgaaactttcgttgacacatatgagtcttgtgatgtactggctgatttctacgaccagttcgctgaccagttgcacgagtctcaacgcgacaaaatgccagcacttccggctaaaggtaacttgaacctccgtgacatcttaaaatcggacttcgcgttcgcg

SEQ ID NO: 1408 - protein, 890 aa, synthetic construct
  REGION 1..890: note = Variant of RNA polymerase
MHHHHHHMNTINIAKNDFSDIELAAIPFNTLADHYGERLAREQLALEHESYEMGEARFRKMFERQLKAGEVADNAAAKPLITTLLPKMIARINDWFEEVKAKRGKRPTAFQFLQEIKPEAVAYITIKTTLACLTSADNTTVQAVASAIGRAIEDEARFGRIRDLEAKHFKKNVEEQLNKRVGHVYKKAFMQVVEHDMLSKGLLGGEAWSSWHKEDSIHVGVRCIEMLIESTGMVSLHRQNAGVVGADSETIELAPEYAEAIATRAGALAGISPMFQPCVVPPKPWTGITGGGYWAAGRKPLQLVRTRSLAALRRYEEVSMPEVIKAVNIAQNTAWRINKKVLDVANTITQWQHCPVADVPAMDHGEMPARPLDIDTNEIALKAWKKEASAFYRKDKARVSRRLSMEFMLSQANKFANYEAIWFPQNMDWRGRVYAVPMFNPQGNDMTKGLLTFAQEKPIGEDGFYWLKIHGANTAGVDKVPFPQRIKFVEDNHTNIMECAKAPLENTWWAEQDSPFCFLAFCFEYAGVINSGLSYNCSLPLAFDGSCSGLQHFSAMLRDEIGGKAVNLLPSAEYQDIYRIVSDKVNEMLKQDLINGTSTTVETVTDKKTGEITQRTKYGTKVMAQWWLEHGVNRGVTKRSVMTLVYGSKEFGFRDQVLSDTIQPAIDNGKGDMFLNPNQAAGYMAKLIWNAVSGTVVAAVEAMNWLKSAAKLLAAEVKDPKTDTVLRGRCAVHWVTPDGFPVWQEYKKPIQTRLNLMFLGQFRLQPTINTNKDSEIDAHKQESGIAPNFVHSQDGNHLRMTVVWAHEKYGIESFALIHDSFGTIPADAANLFKAVRETFVDTYESCDVLADFYDQFADQLHESQRDKMPALPAKGNLNLRDILKSDFAFA

SEQ ID NO: 1409 - DNA, 2670 bp, synthetic construct
  misc_feature 1..2670: note = Variant of RNA polymerase
  source 1..2670: mol_type = other DNA
atgcaccatcaccatcaccatatgaacacgattaacattgctaagaacgacttctctgacatcgaactggctgctatcccgttcaacactctggctgaccattacggtgagcgtttagctcgcgaacagttggcccttgagcatgagtcttacgagatgggtgaagcacgcttccgcaagatgtttgagcgtcaacttaaagctggtgaggttgcggataacgctgccgccaagcctctcatcactaccctactccctaagatgattgcacgcatcaacgactggtttgaggaagtgaaagctaagcgcggcaagcgcccgacagccttccagttcctgcaagaaatcaagccggaagccgtagcgtacatcaccattaagaccactctggcttgcctaaccagtgcggacaatacaaccgttcaggctgtagcaagcgcaatcggtcgggccattgaggacgaggctcgcttcggtcgtatccgtgaccttgaagctaagcacttcaagaagaacgttgaggaacaactcaacaagcgcgtagggcacgtctacaagaaagcatttatgcaagttgtcgagcacgacatgctctctaagggtctactcggtggcgaggcgtggtcttcgtggcataaggaagactctattcatgtaggagtacgctgcatcgagatgctcattgagtcaaccggaatggttagcttacaccgccaaaatgctggcgtagtaggtcaagactctgagactatcgaactcgcacctgaatacgctgaggctatcgcaacccgtgcaggtgcgctggctggcatctctccgatgttccaaccttgcgtagttcctcctaagccgtggactggcattactggtggtggctattgggctgcggggcgcaaacccctgcagttagtacgtactcgcagtctggcggcgcttcgccgctatgaagaagtgtcgatgccggaggtcatcaaagcagtcaacattgcgcagaatacagcatggcgtattaacaagaaagttctcgacgtagcgaataccatcacccaatggcagcactgtccagtcgcggatgtgcctgcgatggatcgtggcgaaatgccagctcgtccgttggacatcgataccaacgagattgcacttaaagcgtggaagaaagaagcttccgcgttctaccgcaaagacaaagcacgcgttagccgtcgtctgtcaatggagtttatgttatctcaggcgaacaagtttgcgaattatgaggcaatctggtttccgcaaaacatggattggcgtgggcgcgtgtacgctgtcccgatgttcaatcctcagggcaacgatatgacgaaaggcctgctgacctttgcgcaggagaaacccattggtgaagacggcttctattggctcaagattcatggcgcaaatacagctggagtggataaagtaccgtttccacaacgcatcaaatttgttgaggataaccatacgaatattatggaatgcgcgaaagcaccgctggaaaacacttggtgggcggaacaggactcgccgttctgttttctggcgttctgctttgagtatgctggcgtcatcaatagtggtctgtcgtacaactgtagcttgcctctggcatttgatggtagttgctccggcctgcaacatttctcagcgatgttacgcgacgaaattggcggcaaagctgtgaatctcctcccatctgcggaataccaggatatttatcgtatcgtcagcgacaaagttaacgagatgctgaaacaagatctgattaacggtacctctaccaccgtggaaacggtgactgataagaagacaggcgaaattacccaacgcacgaaatacgggaccaaagttatggcacagcagtggttagaacacggtgtgaatcgtggcgtcacgaaacgctcggttatgactttggtgtatgggagcaaagagtttggattccgcgatcaagtgctgagtgacaccattcaaccggcgatcgataacggcaaaggtgacatgtttctgaatccgaatcaggctgctggttacatggcgaaactgatctggaacgcagtgtccgggaccgtagtcgcagcagttgaggcgatgaactggctgaaaagtgcggcgaaattacttgctgctgaagtgaaggatcctaagacggatacagttctgcgtggccgctgcgcagtacattgggtgactcccgacggcttccctgtgtggcaggaatacaagaagcctattcagacgcgcttgaacctgatgttcctcggtcagttccgcttacagcctaccattaacaccaacaaagatagcgagattgatgcacacaaacaggagtctggtatcgctcctaactttgtacacagccaagacggtaaccaccttcgtatgactgtagtgtgggcacacgagaagtacggaatcgaatcttttgcactgattcacgactccttcggtaccattccggctgacgctgcgaacctgttcaaagcagtgcgcgaaactttcgttgacacatatgagtcttgtgatgtactggctgatttctacgaccagttcgctgaccagttgcacgagtctcaacgcgacaaaatgccagcacttccggctaaaggtaacttgaacctccgtgacatcttaaaatcggacttcgcgttcgcg

SEQ ID NO: 1410 - protein, 890 aa, synthetic construct
  REGION 1..890: note = Variant of RNA polymerase
MHHHHHHMNTINIAKNDFSDIELAAIPFNTLADHYGERLAREQLALEHESYEMGEARFRKMFERQLKAGEVADNAAAKPLITTLLPKMIARINDWFEEVKAKRGKRPTAFQFLQEIKPEAVAYITIKTTLACLTSADNTTVQAVASAIGRAIEDEARFGRIRDLEAKHFKKNVEEQLNKRVGHVYKKAFMQVVEHDMLSKGLLGGEAWSSWHKEDSIHVGVRCIEMLIESTGMVSLHRQNAGVVGQDSETIELAPEYAEAIATRAGALAGISPMFQPCVVPPKPWTGITGGGYWAAGRKPLQLVRTRSLAALRRYEEVSMPEVIKAVNIAQNTAWRINKKVLDVANTITQWQHCPVADVPAMDRGEMPARPLDIDTNEIALKAWKKEASAFYRKDKARVSRRLSMEFMLSQANKFANYEAIWFPQNMDWRGRVYAVPMFNPQGNDMTKGLLTFAQEKPIGEDGFYWLKIHGANTAGVDKVPFPQRIKFVEDNHTNIMECAKAPLENTWWAEQDSPFCFLAFCFEYAGVINSGLSYNCSLPLAFDGSCSGLQHFSAMLRDEIGGKAVNLLPSAEYQDIYRIVSDKVNEMLKQDLINGTSTTVETVTDKKTGEITQRTKYGTKVMAQQWLEHGVNRGVTKRSVMTLVYGSKEFGFRDQVLSDTIQPAIDNGKGDMFLNPNQAAGYMAKLIWNAVSGTVVAAVEAMNWLKSAAKLLAAEVKDPKTDTVLRGRCAVHWVTPDGFPVWQEYKKPIQTRLNLMFLGQFRLQPTINTNKDSEIDAHKQESGIAPNFVHSQDGNHLRMTVVWAHEKYGIESFALIHDSFGTIPADAANLFKAVRETFVDTYESCDVLADFYDQFADQLHESQRDKMPALPAKGNLNLRDILKSDFAFA

SEQ ID NO: 1411 - DNA, 2670 bp, synthetic construct
  misc_feature 1..2670: note = Variant of RNA polymerase
  source 1..2670: mol_type = other DNA
atgcaccatcaccatcaccatatgaacacgattaacattgctaagaacgacttctctgacatcgaactggctgctatcccgttcaacactctggctgaccattacggtgagcgtttagctcgcgaacagttggcccttgagcatgagtcttacgagatgggtgaagcacgcttccgcaagatgtttgagcgtcaacttaaagctggtgaggttgcggataacgctgccgccaagcctctcatcactaccctactccctaagatgattgcacgcatcaacgactggtttgaggaagtgaaagctaagcgcggcaagcgcccgacagccttccagttcctgcaagaaatcaagccggaagccgtagcgtacatcaccattaagaccactctggcttgcctaaccagtgcggacaatacaaccgttcaggctgtagcaagcgcaatcggtcgggccattgaggacgaggctcgcttcggtcgtatccgtgaccttgaagctaagcacttcaagaagaacgttgaggaacaactcaacaagcgcgtagggcacgtctacaagaaagcatttatgcaagttgtcgagcacgacatgctctctaagggtctactcggtggcgaggcgtggtcttcgtggcataaggaagactctattcatgtaggagtacgctgcatcgagatgctcattgagtcaaccggaatggttagcttacaccgccaaaatgctggcgtagtaggtcaagactctgagactatcgaactcgcacctgaatacgctgaggctatcgcaacccgtgcaggtgcgctggctggcatctctccgatgttccaaccttgcgtagttcctcctaagccgtggactggcattactggtggtggctattgggctgcggggcgcaaacccctgcagttagtacgtactcgcagtctggcggcgcttcgccgctatgaagaagtgtcgatgccggaggtcatcaaagcagtcaacattgcgcagaatacagcatggcgtattaacaagaaagttctcgacgtagcgaataccatcacccaatggcagcactgtccagtcgcggatgtgcctgcgatggatcgtggcgaaatgccagctcgtccgttggacatcgatatgaacgagattgcacttaaagcgtggaagaaagaagcttccgcgttctaccgcaaagacaaagcacgcgttagccgtcgtctgtcaatggagtttatgttatctcaggcgaacaagtttgcgaattatgaggcaatctggtttccgcaaaacatggattggcgtgggcgcgtgtacgctgtcccgatgttcaatcctcagggcaacgatatgacgaaaggcctgctgacctttgcgcaggagaaacccattggtgaagacggcttctattggctcaagattcatggcgcaaatacagctggagtggataaagtaccgtttccacaacgcatcaaatttgttgaggataaccatacgaatattatggaatgcgcgaaagcaccgctggaaaacacttggtgggcggaacaggactcgccgttctgttttctggcgttctgctttgagtatgctggcgtcatcaatagtggtctgtcgtacaactgtagcttgcctctggcatttgatggtagttgctccggcctgcaacatttctcagcgatgttacgcgacgaaattggcggcaaagctgtgaatctcctcccatctgcggaataccaggatatttatcgtatcgtcagcgacaaagttaacgagatgctgaaacaagatctgattaacggtacctctaccaccgtggaaacggtgactgataagaagacaggcgaaattacccaacgcacgaaatacgggaccaaagttatggcacagtggtggttagaacacggtgtgaatcgtggcgtcacgaaacgctcggttatgactttggtgtatgggagcaaagagtttggattccgcgatcaagtgctgagtgacaccattcaaccggcgatcgataacggcaaaggtgacatgtttctgaatccgaatcaggctgctggttacatggcgaaactgatctggaacgcagtgtccgggaccgtagtcgcagcagttgaggcgatgaactggctgaaaagtgcggcgaaattacttgctgctgaagtgaaggatcctaagacggatacagttctgcgtggccgctgcgcagtacattgggtgactcccgacggcttccctgtgtggcaggaatacaagaagcctattcagacgcgcttgaacctgatgttcctcggtcagttccgcttacagcctaccattaacaccaacaaagatagcgagattgatgcacacaaacaggagtctggtatcgctcctaactttgtacacagccaagacggtaaccaccttcgtatgactgtagtgtgggcacacgagaagtacggaatcgaatcttttgcactgattcacgactccttcggtaccattccggctgacgctgcgaacctgttcaaagcagtgcgcgaaactttcgttgacacatatgagtcttgtgatgtactggctgatttctacgaccagttcgctgaccagttgcacgagtctcaacgcgacaaaatgccagcacttccggctaaaggtaacttgaacctccgtgacatcttaaaatcggacttcgcgttcgcg

SEQ ID NO: 1412 - protein, 890 aa, synthetic construct
  REGION 1..890: note = Variant of RNA polymerase
MHHHHHHMNTINIAKNDFSDIELAAIPFNTLADHYGERLAREQLALEHESYEMGEARFRKMFERQLKAGEVADNAAAKPLITTLLPKMIARINDWFEEVKAKRGKRPTAFQFLQEIKPEAVAYITIKTTLACLTSADNTTVQAVASAIGRAIEDEARFGRIRDLEAKHFKKNVEEQLNKRVGHVYKKAFMQVVEHDMLSKGLLGGEAWSSWHKEDSIHVGVRCIEMLIESTGMVSLHRQNAGVVGQDSETIELAPEYAEAIATRAGALAGISPMFQPCVVPPKPWTGITGGGYWAAGRKPLQLVRTRSLAALRRYEEVSMPEVIKAVNIAQNTAWRINKKVLDVANTITQWQHCPVADVPAMDRGEMPARPLDIDMNEIALKAWKKEASAFYRKDKARVSRRLSMEFMLSQANKFANYEAIWFPQNMDWRGRVYAVPMFNPQGNDMTKGLLTFAQEKPIGEDGFYWLKIHGANTAGVDKVPFPQRIKFVEDNHTNIMECAKAPLENTWWAEQDSPFCFLAFCFEYAGVINSGLSYNCSLPLAFDGSCSGLQHFSAMLRDEIGGKAVNLLPSAEYQDIYRIVSDKVNEMLKQDLINGTSTTVETVTDKKTGEITQRTKYGTKVMAQWWLEHGVNRGVTKRSVMTLVYGSKEFGFRDQVLSDTIQPAIDNGKGDMFLNPNQAAGYMAKLIWNAVSGTVVAAVEAMNWLKSAAKLLAAEVKDPKTDTVLRGRCAVHWVTPDGFPVWQEYKKPIQTRLNLMFLGQFRLQPTINTNKDSEIDAHKQESGIAPNFVHSQDGNHLRMTVVWAHEKYGIESFALIHDSFGTIPADAANLFKAVRETFVDTYESCDVLADFYDQFADQLHESQRDKMPALPAKGNLNLRDILKSDFAFA

SEQ ID NO: 1413 - DNA, 2670 bp, synthetic construct
  misc_feature 1..2670: note = Variant of RNA polymerase
  source 1..2670: mol_type = other DNA
atgcaccatcaccatcaccatatgaacacgattaacattgctaagaacgacttctctgacatcgaactggctgctatcccgttcaacactctggctgaccattacggtgagcgtttagctcgcgaacagttggcccttgagcatgagtcttacgagatgggtgaagcacgcttccgcaagatgtttgagcgtcaacttaaagctggtgaggttgcggataacgctgccgccaagcctctcatcactaccctactccctaagatgattgcacgcatcaacgactggtttgaggaagtgaaagctaagcgcggcaagcgcccgacagccttccagttcctgcaagaaatcaagccggaagccgtagcgtacatcaccattaagaccactctggcttgcctaaccagtgcggacaatacaaccgttcaggctgtagcaagcgcaatcggtcgggccattgaggacgaggctcgcttcggtcgtatccgtgaccttgaagctaagcacttcaagaagaacgttgaggaacaactcaacaagcgcgtagggcacgtctacaagaaagcatttatgcaagttgtcgagcacgacatgctctctaagggtctactcggtggcgaggcgtggtcttcgtggcataaggaagactctattcatgtaggagtacgctgcatcgagatgctcattgagtcaaccggaatggttagcttacaccgccaaaatgctggcgtagtaggtcaagactctgagactatcgaactcgcacctgaatacgctgaggctatcgcaacccgtgcaggtgcgctggctggcatctctccgatgttccaaccttgcgtagttcctcctaagccgtggactggcattactggtggtggctattgggctgcggggcgcaaacccctgcagttagtacgtactcgcagtctggcggcgcttcgccgctatgaagaagtgtcgatgccggaggtcatcaaagcagtcaacattgcgcagaatacagcatggcgtattaacaagaaagttctcgacgtagcgaataccatcacccaatggcagcactgtccagtcgcggatgtgcctgcgatggatcgtggcgaaatgccagctcgtccgttggacatcgataccaacgagattgcacttaaagcgtggaagaaagaagcttccgcgttctaccgcaaagacaaagcacgcgttagccgtcgtctgtcaatggagtttatgttatctcaggcgaacaagtttgcgaattatgaggcaatctggtttccgcaaaacatggattggcgtgggcgcgtgtacgctgtcccgatgttcaatcctcagggcaacgatatgacgaaaggcctgctgacctttgcgcaggagaaacccattggtgaagacggcttctattggctcaagattcatggcgcaaatacagctggagtggataaagtaccgtttccacaacgcatcaaatttgttgaggataaccatacgaatattatggaatgcgcgaaagcaccgctggaaaacacttggtgggcggaacaggactcgccgttctgttttctggcgttctgctttgagtatgctggcgtcatcaatagtggtctgtcgtacaactgtagcttgcctctggcatttgatggtagttgctccggcctgcaacatttctcagcgatgttacgcgacgaaattggcggcaaagctgtgaatctcctcccatctgcggaataccaggatatttatcgtatcgtcagcgacaaagttaacgagatgctgaaacaagatctgattaacggtacctctaccaccgtggaaacggtgactgataagaagacaggcgaaattacccaacgcacgaaatacgggaccaaagttatggcagggtggtggttagaacacggtgtgaatcgtggcgtcacgaaacgctcggttatgactttggtgtatgggagcaaagagtttggattccgcgatcaagtgctgagtgacaccattcaaccggcgatcgataacggcaaaggtgacatgtttctgaatccgaatcaggctgctggttacatggcgaaactgatctggaacgcagtgtccgggaccgtagtcgcagcagttgaggcgatgaactggctgaaaagtgcggcgaaattacttgctgctgaagtgaaggatcctaagacggatacagttctgcgtggccgctgcgcagtacattgggtgactcccgacggcttccctgtgtggcaggaatacaagaagcctattcagacgcgcttgaacctgatgttcctcggtcagttccgcttacagcctaccattaacaccaacaaagatagcgagattgatgcacacaaacaggagtctggtatcgctcctaactttgtacacagccaagacggtaaccaccttcgtatgactgtagtgtgggcacacgagaagtacggaatcgaatcttttgcactgattcacgactccttcggtaccattccggctgacgctgcgaacctgttcaaagcagtgcgcgaaactttcgttgacacatatgagtcttgtgatgtactggctgatttctacgaccagttcgctgaccagttgcacgagtctcaacgcgacaaaatgccagcacttccggctaaaggtaacttgaacctccgtgacatcttaaaatcggacttcgcgttcgcg

SEQ ID NO: 1414 - protein, 890 aa, synthetic construct
  REGION 1..890: note = Variant of RNA polymerase
MHHHHHHMNTINIAKNDFSDIELAAIPFNTLADHYGERLAREQLALEHESYEMGEARFRKMFERQLKAGEVADNAAAKPLITTLLPKMIARINDWFEEVKAKRGKRPTAFQFLQEIKPEAVAYITIKTTLACLTSADNTTVQAVASAIGRAIEDEARFGRIRDLEAKHFKKNVEEQLNKRVGHVYKKAFMQVVEHDMLSKGLLGGEAWSSWHKEDSIHVGVRCIEMLIESTGMVSLHRQNAGVVGQDSETIELAPEYAEAIATRAGALAGISPMFQPCVVPPKPWTGITGGGYWAAGRKPLQLVRTRSLAALRRYEEVSMPEVIKAVNIAQNTAWRINKKVLDVANTITQWQHCPVADVPAMDRGEMPARPLDIDTNEIALKAWKKEASAFYRKDKARVSRRLSMEFMLSQANKFANYEAIWFPQNMDWRGRVYAVPMFNPQGNDMTKGLLTFAQEKPIGEDGFYWLKIHGANTAGVDKVPFPQRIKFVEDNHTNIMECAKAPLENTWWAEQDSPFCFLAFCFEYAGVINSGLSYNCSLPLAFDGSCSGLQHFSAMLRDEIGGKAVNLLPSAEYQDIYRIVSDKVNEMLKQDLINGTSTTVETVTDKKTGEITQRTKYGTKVMAGWWLEHGVNRGVTKRSVMTLVYGSKEFGFRDQVLSDTIQPAIDNGKGDMFLNPNQAAGYMAKLIWNAVSGTVVAAVEAMNWLKSAAKLLAAEVKDPKTDTVLRGRCAVHWVTPDGFPVWQEYKKPIQTRLNLMFLGQFRLQPTINTNKDSEIDAHKQESGIAPNFVHSQDGNHLRMTVVWAHEKYGIESFALIHDSFGTIPADAANLFKAVRETFVDTYESCDVLADFYDQFADQLHESQRDKMPALPAKGNLNLRDILKSDFAFA

SEQ ID NO: 1415 - DNA, 2670 bp, synthetic construct
  misc_feature 1..2670: note = Variant of RNA polymerase
  source 1..2670: mol_type = other DNA
atgcaccatcaccatcaccatatgaacacgattaacattgctaagaacgacttctctgacatcgaactggctgctatcccgttcaacactctggctgaccattacggtgagcgtttagctcgcgaacagttggcccttgagcatgagtcttacgagatgggtgaagcacgcttccgcaagatgtttgagcgtcaacttaaagctggtgaggttgcggataacgctgccgccaagcctctcatcactaccctactccctaagatgattgcacgcatcaacgactggtttgaggaagtgaaagctaagcgcggcaagcgcccgacagccttccagttcctgcaagaaatcaagccggaagccgtagcgtacatcaccattaagaccactctggcttgcctgaccagtgcggacaatacaaccgttcaggctgtagcaagcgcaatcggtcgggccattgaggacgaggctcgcttcggtcgtatccgtgaccttgaagctaagcacttcaagaagaacgttgaggaacaactcaacaagcgcgtagggcacgtctacaagaaagcatttatgcaagttgtcgagcacgacatgctctctaagggtctactcggtggcgaggcgtggtcttcgtggcataaggaagactctattcatgtaggagtacgctgcatcgagatgctcattgagtcaaccggaatggttagcttacaccgccaaaatgctggcgtagtaggtcaagactctgagactatcgaactcgcacctgaatacgctgaggctatcgcaacccgtgcaggtgcgctggctggcatctctccgatgttccaaccttgcgtagttcctcctaagccgtggactggcattactggtggtggctattgggctgcggggcgcaaacccctgcagttagtacgtactcgcagtctggcggcgcttcgccgctatgaagaagtgtcgatgccggaggtcatcaaagcagtcaacattgcgcagaatacagcatggcgtattaacaagaaagttctcgacgtagcgaataccatcacccaatggcagcactgtccagtcgcggatgtgcctgcgatggatcgcggcgaaatgccagctcgtccgttggacatcgataccaacgagagtgcacttaaagcgtggaagaaagaagcttccgcgttctaccgcaaagacaaagcacgcgttagccgtcgtctgtcaatggagtttatgttatctcaggcgaacaagtttgtcaattatgaggcaatctggtttccgcaaaacatggattggcgtgggcgcgtgtacgctgtcccgatgttcaatcctcagggcaacgatatgacgaaaggcctgctgacctttgcgcaggagaaacccattggtgaagacggcttctattggctcaagattcatggcgcaaatacagctggagtggataaagtaccgtttccacaacgcatcaaatttgttgaggataaccatacgaatattatggaatgcgcgaaagcaccgctggaaaacacttggtgggcggaacaggactcgccgttctgttttctggcgttctgctttgagtatgctggcgtcatcaatagtggtctgtcgtacaactgtagcttgcctctggcatttgatggtagttgctccggcctgcaacatttctcagcgatgttacgcgacgaaattggcggcaaagctgtgaatctcctcccatctgcggaataccaggatatttatcgtatcgtcagcgacaaagttaacgagatgctgaaacaagatctgattaacggtacctctaccaccgtggaaacggtgactgataagaagacaggcgaaattacccaacgcacgaaatacgggaccaaagttatggcacagtggtggttagaacacggtgtgaatcgtggcgtcacgaaacgctcggttatgactttggtgtatgggagcaaagagtttggattccgcgatcaagtgctgagtgacaccattcaaccggcgatcgataacggcaaaggtgacatgtttctgaatccgaatcaggctgctggttacatggcgaaactgatctggaacgcagtgtccgggaccgtagtcgcagcagttgaggcgatgaactggctgaaaagtgcggcgaaattacttgctgctgaagtgaaggatcctaagacggatacagttctgcgtggccgctgcgcagtacattgggtgactcccgacggcttccctgtgtggcaggaatacaagaagcctattcagacgcgcttgaacctgatgttcctcggtcagttccgcttacagcctaccattaacaccaacaaagatagcgagattgatgcacacaaacaggagtctggtatcgctcctaactttgtacacagccaagacggtaaccaccttcgtatgactgtagtgtgggcacacgagaagtacggaatcgaatcttttgcactgattcacgactccttcggtaccattccggctgacgctgcgaacctgttcaaagcagtgcgcgaaactttcgttgacacatatgagtcttgtgatgtactggctgatttctacgaccagttcgctgaccagttgcacgagtctcaacgcgacaaaatgccagcacttccggctaaaggtaacttgaacctccgtgacatcttaaaatcggacttcgcgttcgcg

SEQ ID NO: 1416 - protein, 890 aa, synthetic construct
  REGION 1..890: note = Variant of RNA polymerase
MHHHHHHMNTINIAKNDFSDIELAAIPFNTLADHYGERLAREQLALEHESYEMGEARFRKMFERQLKAGEVADNAAAKPLITTLLPKMIARINDWFEEVKAKRGKRPTAFQFLQEIKPEAVAYITIKTTLACLTSADNTTVQAVASAIGRAIEDEARFGRIRDLEAKHFKKNVEEQLNKRVGHVYKKAFMQVVEHDMLSKGLLGGEAWSSWHKEDSIHVGVRCIEMLIESTGMVSLHRQNAGVVGQDSETIELAPEYAEAIATRAGALAGISPMFQPCVVPPKPWTGITGGGYWAAGRKPLQLVRTRSLAALRRYEEVSMPEVIKAVNIAQNTAWRINKKVLDVANTITQWQHCPVADVPAMDRGEMPARPLDIDTNESALKAWKKEASAFYRKDKARVSRRLSMEFMLSQANKFVNYEAIWFPQNMDWRGRVYAVPMFNPQGNDMTKGLLTFAQEKPIGEDGFYWLKIHGANTAGVDKVPFPQRIKFVEDNHTNIMECAKAPLENTWWAEQDSPFCFLAFCFEYAGVINSGLSYNCSLPLAFDGSCSGLQHFSAMLRDEIGGKAVNLLPSAEYQDIYRIVSDKVNEMLKQDLINGTSTTVETVTDKKTGEITQRTKYGTKVMAQWWLEHGVNRGVTKRSVMTLVYGSKEFGFRDQVLSDTIQPAIDNGKGDMFLNPNQAAGYMAKLIWNAVSGTVVAAVEAMNWLKSAAKLLAAEVKDPKTDTVLRGRCAVHWVTPDGFPVWQEYKKPIQTRLNLMFLGQFRLQPTINTNKDSEIDAHKQESGIAPNFVHSQDGNHLRMTVVWAHEKYGIESFALIHDSFGTIPADAANLFKAVRETFVDTYESCDVLADFYDQFADQLHESQRDKMPALPAKGNLNLRDILKSDFAFA

SEQ ID NO: 1417 - DNA, 2670 bp, synthetic construct
  misc_feature 1..2670: note = Variant of RNA polymerase
  source 1..2670: mol_type = other DNA
atgcaccatcaccatcaccatatgaacacgattaacattgctaagaacgacttctctgacatcgaactggctgctatcccgttcaacactctggctgaccattacggtgagcgtttagctcgcgaacagttggcccttgagcatgagtcttacgagatgggtgaagcacgcttccgcaagatgtttgagcgtcaacttaaagctggtgaggttgcggataacgctgccgccaagcctctcatcactaccctactccctaagatgattgcacgcatcaacgactggtttgaggaagtgaaagctaagcgcggcaagcgcccgacagccttccagttcctgcaagaaatcaagccggaagccgtagcgtacatcaccattaagaccactctggcttgcctaaccagtgcggacaatacaaccgttcaggctgtagcaagcgcaatcggtcgggccattgaggacgaggctcgcttcggtcgtatccgtgaccttgaagctaagcacttcaagaagaacgttgaggaacaactcaacaagcgcgtagggcacgtctacaagaaagcatttatgcaagttgtcgagcacgacatgctctctaagggtctactcggtggcgaggcgtggtcttcgtggcataaggaagactctattcatgtaggagtacgctgcatcgagatgctcattgagtcaaccggaatggttagcttacaccgccaaaatgctggcgtagtaggtcaagactctgagactatcgaactcgcacctgaatacgctgaggctatcgcaacccgtgcaggtgcgctggctggcatctctccgatgttccaaccttgcgtagttcctcctaagccgtggactggcattactggtggtggctattgggctgcggggcgcaaacccctgcagttagtacgtactcgcagtctggcggcgcttcgccgctatgaagaagtgtcgatgccggaggtcatcaaagcagtcaacattgcgcagaatacagcatggcgtattaacaagaaagttctcgacgtagcgaataccatcaccaaatggcagcactgtccagtcgcggatgtgcctgcgatggatcgtggcgaaatgccagctcgtccgttggacatcgataccaacgagattgcacttaaagcgtggaagaaagaagcttccgcgttctaccgcaaagacaaagcacgcgttagccgtcgtctgtcaatggagtttatgttatctcaggcgaacaagtttgcgaattatgaggcaatctggtttccgcaaaacatggattggcgtgggcgcgtgtacgctgtcccgatgttcaatcctcagggcaacgatatgacgaaaggcctgctgacctttgcgcaggagaaacccattggtgaagacggcttctattggctcaagattcatggcgcaaatacagctggagtggataaagtaccgtttccacaacgcatcaaatttgttgaggataaccatacgaatattatggaatgcgcgaaagcaccgctggaaaacacttggtgggcggaacaggactcgccgttctgttttctggcgttctgctttgagtatgctggcgtcatcaatagtggtctgtcgtacaactgtagcttgcctctggcatttgatggtagttgctccggcctgcaacatttctcagcgatgttacgcgacgaaattggcggcaaagctgtgaatctcctcccatctgcggaataccaggatatttatcgtatcgtcagcgacaaagttaacgagatgctgaaacaagatctgattaacggtacctctaccaccgtggaaacggtgactgataagaagacaggcgaaattacccaacgcacgaaatacgggaccaaagttatggcacagtggtggttagaacacggtgtgaatcgtggcgtcacgaaacgctcggttatgactttggtgtatgggagcaaagagtttggattccgcgatcaagtgctgagtgacaccattcaaccggcgatcgataacggcaaaggtgacatgtttctgaatccgaatcaggctgctggttacatggcgaaactgatctggaacgcagtgtccgggaccgtagtcgcagcagttgaggcgatgaactggctgaaaagtgcggcgaaattacttgctgctgaagtgaaggatcctaagacggatacagttctgcgtggccgctgcgcagtacattgggtgactcccgacggcttccctgtgtggcaggaatacaagaagcctattcagacgcgcttgaacctgatgttcctcggtcagttccgcttacagcctaccattaacaccaacaaagatagcgagattgatgcacacaaacaggagtctggtatcgctcctaactttgtacacagccaagacggtaaccaccttcgtatgactgtagtgtgggcacacgagaagtacggaatcgaatcttttgcactgattcacgactccttcggtaccattccggctgacgctgcgaacctgttcaaagcagtgcgcgaaactttcgttgacacatatgagtcttgtgatgtactggctgatttctacgaccagttcgctgaccagttgcacgagtctcaacgcgacaaaatgccagcacttccggctaaaggtaacttgaacctccgtgacatcttaaaatcggacttcgcgttcgcg

SEQ ID NO: 1418 - protein, 890 aa, synthetic construct
  REGION 1..890: note = Variant of RNA polymerase
MHHHHHHMNTINIAKNDFSDIELAAIPFNTLADHYGERLAREQLALEHESYEMGEARFRKMFERQLKAGEVADNAAAKPLITTLLPKMIARINDWFEEVKAKRGKRPTAFQFLQEIKPEAVAYITIKTTLACLTSADNTTVQAVASAIGRAIEDEARFGRIRDLEAKHFKKNVEEQLNKRVGHVYKKAFMQVVEHDMLSKGLLGGEAWSSWHKEDSIHVGVRCIEMLIESTGMVSLHRQNAGVVGQDSETIELAPEYAEAIATRAGALAGISPMFQPCVVPPKPWTGITGGGYWAAGRKPLQLVRTRSLAALRRYEEVSMPEVIKAVNIAQNTAWRINKKVLDVANTITKWQHCPVADVPAMDRGEMPARPLDIDTNEIALKAWKKEASAFYRKDKARVSRRLSMEFMLSQANKFANYEAIWFPQNMDWRGRVYAVPMFNPQGNDMTKGLLTFAQEKPIGEDGFYWLKIHGANTAGVDKVPFPQRIKFVEDNHTNIMECAKAPLENTWWAEQDSPFCFLAFCFEYAGVINSGLSYNCSLPLAFDGSCSGLQHFSAMLRDEIGGKAVNLLPSAEYQDIYRIVSDKVNEMLKQDLINGTSTTVETVTDKKTGEITQRTKYGTKVMAQWWLEHGVNRGVTKRSVMTLVYGSKEFGFRDQVLSDTIQPAIDNGKGDMFLNPNQAAGYMAKLIWNAVSGTVVAAVEAMNWLKSAAKLLAAEVKDPKTDTVLRGRCAVHWVTPDGFPVWQEYKKPIQTRLNLMFLGQFRLQPTINTNKDSEIDAHKQESGIAPNFVHSQDGNHLRMTVVWAHEKYGIESFALIHDSFGTIPADAANLFKAVRETFVDTYESCDVLADFYDQFADQLHESQRDKMPALPAKGNLNLRDILKSDFAFA

SEQ ID NO: 1419 - DNA, 2670 bp, synthetic construct
  misc_feature 1..2670: note = Variant of RNA polymerase
  source 1..2670: mol_type = other DNA
atgcaccatcaccatcaccatatgaacacgattaacattgctaagaacgacttctctgacatcgaactggctgctatcccgttcaacactctggctgaccattacggtgagcgtttagctcgcgaacagttggcccttgagcatgagtcttacgagatgggtgaagcacgcttccgcaagatgtttgagcgtcaacttaaagctggtgaggttgcggataacgctgccgccaagcctctcatcactaccctactccctaagatgattgcacgcatcaacgactggtttgaggaagtgaaagctaagcgcggcaagcgcccgacagccttccagttcctgcaagaaatcaagccggaagccgtagcgtacatcaccattaagaccactctggcttgcctaaccagtgcggacaatacaaccgttcaggctgtagcaagcgcaatcggtcgggccattgaggacgaggctcgcttcggtcgtatccgtgaccttgaagctaagcacttcaagaagaacgttgaggaacaactcaacaagcgcgtagggcacgtctacaagaaagcatttatgcaagttgtcgagcacgacatgctctctaagggtctactcggtggcgaggcgtggtcttcgtggcataaggaagactctattcatgtaggagtacgctgcatcgagatgctcattgagtcaaccggaatggttagcttacaccgccaaaatgctggcgtagtaggtcaagactctgagactatcgaactcgcacctgaatacgctgaggctatcgcaacccgtgcaggtgcgctggctggcatctctccgatgttccaaccttgcgtagttcctcctaagccgtggactggcattactggtggtggctattgggctgcggggcgcaaacccctgcagttagtacgtactcgcagtctggcggcgcttcgccgctatgaagaagtgtcgatgccggaggtcatcaaagcagtcaacattgcgcagaatacagcatggcgtattaacaagaaagttctcgacgtagcgaataccatcacccaatggcagcactgtccagtcgcggatgtgcctgcgatggatcgtggcgaaatgccagctcgtccgttggacatcgataccaacgagattgcacttaaagcgtggaagaaagaagcttccgcgttctaccgcaaagacaaagcacgcgttagccgtcgtctgtcaatggagtttatgttatctcaggcgaacaagtttgcgaattatgaggcaatctggtttccgcaaaacatggattggcgtgggcgcgtgtacgctgtcccgatgttcaatcctcagggcaacgatatgacgaaaggcctgctgacctttgcgcaggagaaacccattggtgaagacggcttctattggctcaagattcatggcgcaaatacagctggagtggataaagtaccgtttccacaacgcatcaaatttgttgaggataaccatacgaatattatggaatgcgcgaaagcaccgctggaaaacacttggtgggcggaacaggactcgccgttctgttttctggcgttctgctttgagtatgctggcgtcatcaatagtggtctgtcgtacaactgtagcttgcctctggcatttgatggtagttgctccggcctgcaacatttctcagcgatgttacgcgacgaaattggcggcaaagctgtgaatctcctcccatctgcggaataccaggatatttatcgtatcgtcagcgacaaagttaacgagatgctgaaacaagatctgattaacggtacctctaataccgtggaaacggtgactgataagaagacaggcgaaattacccaacgcacgaaatacgggaccaaagttatggcacagtggtggttagaacacggtgtgaatcgtggcgtcacgaaacgctcggttatgactttggtgtatgggagcaaagagtttggattccgcgatcaagtgctgagtgacaccattcaaccggcgatcgataacggcaaaggtgacatgtttctgaatccgaatcaggctgctggttacatggcgaaactgatctggaacgcagtgtccgggaccgtagtcgcagcagttgaggcgatgaactggctgaaaagtgcggcgaaattacttgctgctgaagtgaaggatcctaagacggatacagttctgcgtggccgctgcgcagtacattgggtgactcccgacggcttccctgtgtggcaggaatacaagaagcctattcagacgcgcttgaacctgatgttcctcggtcagttccgcttacagcctaccattaacaccaacaaagatagcgagattgatgcacacaaacaggagtctggtatcgctcctaactttgtacacagccaagacggtaaccaccttcgtatgactgtagtgtgggcacacgagaagtacggaatcgaatcttttgcactgattcacgactccttcggtaccattccggctgacgctgcgaacctgttcaaagcagtgcgcgaaactttcgttgacacatatgagtcttgtgatgtactggctgatttctacgaccagttcgctgaccagttgcacgagtctcaacgcgacaaaatgccagcacttccggctaaaggtaacttgaacctccgtgacatcttaaaatcggacttcgcgttcgcg

SEQ ID NO: 1420 - protein, 890 aa, synthetic construct
  REGION 1..890: note = Variant of RNA polymerase
MHHHHHHMNTINIAKNDFSDIELAAIPFNTLADHYGERLAREQLALEHESYEMGEARFRKMFERQLKAGEVADNAAAKPLITTLLPKMIARINDWFEEVKAKRGKRPTAFQFLQEIKPEAVAYITIKTTLACLTSADNTTVQAVASAIGRAIEDEARFGRIRDLEAKHFKKNVEEQLNKRVGHVYKKAFMQVVEHDMLSKGLLGGEAWSSWHKEDSIHVGVRCIEMLIESTGMVSLHRQNAGVVGQDSETIELAPEYAEAIATRAGALAGISPMFQPCVVPPKPWTGITGGGYWAAGRKPLQLVRTRSLAALRRYEEVSMPEVIKAVNIAQNTAWRINKKVLDVANTITQWQHCPVADVPAMDRGEMPARPLDIDTNEIALKAWKKEASAFYRKDKARVSRRLSMEFMLSQANKFANYEAIWFPQNMDWRGRVYAVPMFNPQGNDMTKGLLTFAQEKPIGEDGFYWLKIHGANTAGVDKVPFPQRIKFVEDNHTNIMECAKAPLENTWWAEQDSPFCFLAFCFEYAGVINSGLSYNCSLPLAFDGSCSGLQHFSAMLRDEIGGKAVNLLPSAEYQDIYRIVSDKVNEMLKQDLINGTSNTVETVTDKKTGEITQRTKYGTKVMAQWWLEHGVNRGVTKRSVMTLVYGSKEFGFRDQVLSDTIQPAIDNGKGDMFLNPNQAAGYMAKLIWNAVSGTVVAAVEAMNWLKSAAKLLAAEVKDPKTDTVLRGRCAVHWVTPDGFPVWQEYKKPIQTRLNLMFLGQFRLQPTINTNKDSEIDAHKQESGIAPNFVHSQDGNHLRMTVVWAHEKYGIESFALIHDSFGTIPADAANLFKAVRETFVDTYESCDVLADFYDQFADQLHESQRDKMPALPAKGNLNLRDILKSDFAFA

SEQ ID NO: 1421 - DNA, 2670 bp, synthetic construct
  misc_feature 1..2670: note = Variant of RNA polymerase
  source 1..2670: mol_type = other DNA
atgcaccatcaccatcaccatatgaacacgattaacattgctaagaacgacttctctgacatcgaactggctgctatcccgttcaacactctggctgaccattacggtgagcgtttagctcgcgaacagttggcccttgagcatgagtcttacgagatgggtgaagcacgcttccgcaagatgtttgagcgtcaacttaaagctggtgaggttgcggataacgctgccgccaagcctctcatcactaccctactccctaagatgattgcacgcatcaacgactggtttgaggaagtgaaagctaagcgcggcaagcgcccgacagccttccagttcctgcaagaaatcaagccggaagccgtagcgtacatcaccattaagaccactctggcttgcctaaccagtgcggacaatacaaccgttcaggctgtagcaagcgcaatcggtcgggccattgaggacgaggctcgcttcggtcgtatccgtgaccttgaagctaagcacttcaagaagaacgttgaggaacaactcaacaagcgcgtagggcacgtctacaagaaagcatttatgcaagttgtcgagcacgacatgctctctaagggtctactcggtggcgaggcgtggtcttcgtggcataaggaagactctattcatgtaggagtacgctgcatcgagatgctcattgagtcaaccggaatggttagcttacaccgccaaaatgctggcgtagtaggtcaagactctgagactatcgaactcgcacctgaatacgctgaggctatcgcaacccgtgcaggtgcgctggctggcatctctccgatgttccaaccttgcgtagttcctcctaagccgtggactggcattactggtggtggctattgggctgcggggcgcaaacccctgcagttagtacgtactcgcagtctggcggcgcttcgccgctatgaagaagtgtcgatgccggaggtcatcaaagcagtcaacattgcgcagaatacagcatggcgtattaacaagaaagttctcgacgtagcgaataccatcacccaatggcagcactgtccagtcgcggatgtgcctgcgatggatcgtggcgaaatgccagctcgtccgttggacatcgataccaacgagattgcacttaaagcgtggaagaaagaagcttccgcgttctaccgcaaagacaaagcacgcgttagccgtcgtctgtcaatggagtttatgttatctcaggcgaacaagtttgcgaattatgaggcaatctggtttccgcaaaacatggattggcgtgggcgcgtgtacgctgtcccgatgttcaatcctcagggcaacgatatgacgaaaggcctgctgacctttgcgcaggagaaacccattggtgaagacggcttctattggctcaagattcatggcgcaaatacagctggagtggataaagtaccgtttccacaacgcatcaaatttgttgaggataaccatacgaatattatggaatgcgcgaaagcaccgctggaaaacacttggtgggcggaacaggactcgccgttctgttttctggcgttctgctttgagtatgctggcgtcatcaatagtggtctgtcgtacaactgtagcttgcctctggcatttgatggtagttgctccggcctgcaacatttctcagcgatgttacgcgacgaaattggcggcaaagctgtgaatctcctcccatctgcggaataccaggatatttatcgtatcgtcagcgacaaagttaacgagatgctgaaacaagatctgattaacggtacctctaccgaggtggaaacggtgactgataagaagacaggcgaaattacccaacgcacgaaatacgggaccaaagttatggcacagtggtggttagaacacggtgtgaatcgtggcgtcacgaaacgctcggttatgactttggtgtatgggagcaaagagtttggattccgcgatcaagtgctgagtgacaccattcaaccggcgatcgataacggcaaaggtgacatgtttctgaatccgaatcaggctgctggttacatggcgaaactgatctggaacgcagtgtccgggaccgtagtcgcagcagttgaggcgatgaactggctgaaaagtgcggcgaaattacttgctgctgaagtgaaggatcctaagacggatacagttctgcgtggccgctgcgcagtacattgggtgactcccgacggcttccctgtgtggcaggaatacaagaagcctattcagacgcgcttgaacctgatgttcctcggtcagttccgcttacagcctaccattaacaccaacaaagatagcgagattgatgcacacaaacaggagtctggtatcgctcctaactttgtacacagccaagacggtaaccaccttcgtatgactgtagtgtgggcacacgagaagtacggaatcgaatcttttgcactgattcacgactccttcggtaccattccggctgacgctgcgaacctgttcaaagcagtgcgcgaaactttcgttgacacatatgagtcttgtgatgtactggctgatttctacgaccagttcgctgaccagttgcacgagtctcaacgcgacaaaatgccagcacttccggctaaaggtaacttgaacctccgtgacatcttaaaatcggacttcgcgttcgcg

SEQ ID NO: 1422 - protein, 890 aa, synthetic construct
  REGION 1..890: note = Variant of RNA polymerase
MHHHHHHMNTINIAKNDFSDIELAAIPFNTLADHYGERLAREQLALEHESYEMGEARFRKMFERQLKAGEVADNAAAKPLITTLLPKMIARINDWFEEVKAKRGKRPTAFQFLQEIKPEAVAYITIKTTLACLTSADNTTVQAVASAIGRAIEDEARFGRIRDLEAKHFKKNVEEQLNKRVGHVYKKAFMQVVEHDMLSKGLLGGEAWSSWHKEDSIHVGVRCIEMLIESTGMVSLHRQNAGVVGQDSETIELAPEYAEAIATRAGALAGISPMFQPCVVPPKPWTGITGGGYWAAGRKPLQLVRTRSLAALRRYEEVSMPEVIKAVNIAQNTAWRINKKVLDVANTITQWQHCPVADVPAMDRGEMPARPLDIDTNEIALKAWKKEASAFYRKDKARVSRRLSMEFMLSQANKFANYEAIWFPQNMDWRGRVYAVPMFNPQGNDMTKGLLTFAQEKPIGEDGFYWLKIHGANTAGVDKVPFPQRIKFVEDNHTNIMECAKAPLENTWWAEQDSPFCFLAFCFEYAGVINSGLSYNCSLPLAFDGSCSGLQHFSAMLRDEIGGKAVNLLPSAEYQDIYRIVSDKVNEMLKQDLINGTSTEVETVTDKKTGEITQRTKYGTKVMAQWWLEHGVNRGVTKRSVMTLVYGSKEFGFRDQVLSDTIQPAIDNGKGDMFLNPNQAAGYMAKLIWNAVSGTVVAAVEAMNWLKSAAKLLAAEVKDPKTDTVLRGRCAVHWVTPDGFPVWQEYKKPIQTRLNLMFLGQFRLQPTINTNKDSEIDAHKQESGIAPNFVHSQDGNHLRMTVVWAHEKYGIESFALIHDSFGTIPADAANLFKAVRETFVDTYESCDVLADFYDQFADQLHESQRDKMPALPAKGNLNLRDILKSDFAFA

SEQ ID NO: 1423 - DNA, 2670 bp, synthetic construct
  misc_feature 1..2670: note = Variant of RNA polymerase
  source 1..2670: mol_type = other DNA
atgcaccatcaccatcaccatatgaacacgattaacattgctaagaacgacttctctgacatcgaactggctgctatcccgttcaacactctggctgaccattacggtgagcgtttagctcgcgaacagttggcccttgagcatgagtcttacgagatgggtgaagcacgcttccgcaagatgtttgagcgtcaacttaaagctggtgaggttgcggataacgctgccgccaagcctctcatcactaccctactccctaagatgattgcacgcatcaacgactggtttgaggaagtgaaagctaagcgcggcaagcgcccgacagccttccagttcctgcaagaaatcaagccggaagccgtagcgtacatcaccattaagaccactctggcttgcctaaccagtgcggacaatacaaccgttcaggctgtagcaagcgcaatcggtcgggccattgaggacgaggctcgcttcggtcgtatccgtgaccttgaagctaagcacttcaagaagaacgttgaggaacaactcaacaagcgcgtagggcacgtctacaagaaagcatttatgcaagttgtcgagcacgacatgctctctaagggtctactcggtggcgaggcgtggtcttcgtggcataaggaagactctattcatgtaggagtacgctgcatcgagatgctcattgagtcaaccggaatggttagcttacaccgccaaaatgctggcgtagtaggtcaagactctgagactatcgaactcgcacctgaatacgctgaggctatcgcaacccgtgcaggtgcgctggctggcatctctccgatgttccaaccttgcgtagttcctcctaagccgtggactggcattactggtggtggctattgggctgcggggcgcaaacccctgcagttagtacgtactcgcagtctggcggcgcttcgccgctatgaagaagtgtcgatgccggaggtcatcaaagcagtcaacattgcgcagaatacagcatggcgtattaacaagaaagttctcgacgtagcgaataccatcacccaatggcagcactgtccagtcgcggatgtgcctgcgatggatcgtggcgaaatgccagctcgtccgttggacatcgataccaacgagattgcacttaaagcgtggaagaaagaagcttccgcgttctaccgcaaagacaaagcacgcgttagccgtcgtctgtcaatggagtttatgttatctcaggcgaacaagtttgcgaattatgaggcaatctggtttccgcaaaacatggattggcgtgggcgcgtgtacgctgtcccgatgttcaatcctcagggcaacgatatgacgaaaggcctgctgacctttgcgcaggagaaacccattggtgaagacggcttctattggctcaagattcatggcgcaaatacagctggagtggataaagtaccgtttccacaacgcatcaaatttgttgaggataaccatacgaatattatggaatgcgcgaaagcaccgctggaaaacacttggtgggcggaacaggactcgccgttctgttttctggcgttctgctttgagtatgctggcgtcatcaatagtggtctgtcgtacaactgtagcttgcctctggcatttgatggtagttgctccggcctgcaacatttctcagcgatgttacgcgacgaaattggcggcaaagctgtgaatctcctcccatctgcggaataccaggatatttatcgtatcgtcagcgacaaagttaacgagatgctgaaacaagatctgattaacggtacctctaccaccgtggaaacggtgactgataagaagacaggcgaaattacccaacgcacgaaatacgggaccaaagttatggcacagtggtggttagaacacggtgtgaatcgtggcgtcacgaaacgctcggttatgactttggtgtatgggagcaaagagtttggattccgcgatcaagtgctggaagacaccattcaaccggcgatcgataacggcaaaggtgacatgtttctgaatccgaatcaggctgctggttacatggcgaaactgatctggaacgcagtgtccgggaccgtagtcgcagcagttgaggcgatgaactggctgaaaagtgcggcgaaattacttgctgctgaagtgaaggatcctaagacggatacagttctgcgtggccgctgcgcagtacattgggtgactcccgacggcttccctgtgtggcaggaatacaagaagcctattcagacgcgcttgaacctgatgttcctcggtcagttccgcttacagcctaccattaacaccaacaaagatagcgagattgatgcacacaaacaggagtctggtatcgctcctaactttgtacacagccaagacggtaaccaccttcgtatgactgtagtgtgggcacacgagaagtacggaatcgaatcttttgcactgattcacgactccttcggtaccattccggctgacgctgcgaacctgttcaaagcagtgcgcgaaactttcgttgacacatatgagtcttgtgatgtactggctgatttctacgaccagttcgctgaccagttgcacgagtctcaacgcgacaaaatgccagcacttccggctaaaggtaacttgaacctccgtgacatcttaaaatcggacttcgcgttcgcg

SEQ ID NO: 1424 - protein, 890 aa, synthetic construct
  REGION 1..890: note = Variant of RNA polymerase
MHHHHHHMNTINIAKNDFSDIELAAIPFNTLADHYGERLAREQLALEHESYEMGEARFRKMFERQLKAGEVADNAAAKPLITTLLPKMIARINDWFEEVKAKRGKRPTAFQFLQEIKPEAVAYITIKTTLACLTSADNTTVQAVASAIGRAIEDEARFGRIRDLEAKHFKKNVEEQLNKRVGHVYKKAFMQVVEHDMLSKGLLGGEAWSSWHKEDSIHVGVRCIEMLIESTGMVSLHRQNAGVVGQDSETIELAPEYAEAIATRAGALAGISPMFQPCVVPPKPWTGITGGGYWAAGRKPLQLVRTRSLAALRRYEEVSMPEVIKAVNIAQNTAWRINKKVLDVANTITQWQHCPVADVPAMDRGEMPARPLDIDTNEIALKAWKKEASAFYRKDKARVSRRLSMEFMLSQANKFANYEAIWFPQNMDWRGRVYAVPMFNPQGNDMTKGLLTFAQEKPIGEDGFYWLKIHGANTAGVDKVPFPQRIKFVEDNHTNIMECAKAPLENTWWAEQDSPFCFLAFCFEYAGVINSGLSYNCSLPLAFDGSCSGLQHFSAMLRDEIGGKAVNLLPSAEYQDIYRIVSDKVNEMLKQDLINGTSTTVETVTDKKTGEITQRTKYGTKVMAQWWLEHGVNRGVTKRSVMTLVYGSKEFGFRDQVLEDTIQPAIDNGKGDMFLNPNQAAGYMAKLIWNAVSGTVVAAVEAMNWLKSAAKLLAAEVKDPKTDTVLRGRCAVHWVTPDGFPVWQEYKKPIQTRLNLMFLGQFRLQPTINTNKDSEIDAHKQESGIAPNFVHSQDGNHLRMTVVWAHEKYGIESFALIHDSFGTIPADAANLFKAVRETFVDTYESCDVLADFYDQFADQLHESQRDKMPALPAKGNLNLRDILKSDFAFA

SEQ ID NO: 1425 - DNA, 2670 bp, synthetic construct
  misc_feature 1..2670: note = Variant of RNA polymerase
  source 1..2670: mol_type = other DNA
atgcaccatcaccatcaccatatgaacacgattaacattgctaagaacgacttctctgacatcgaactggctgctatcccgttcaacactctggctgaccattacggtgagcgtttagctcgcgaacagttggcccttgagcatgagtcttacgagatgggtgaagcacgcttccgcaagatgtttgagcgtcaacttaaagctggtgaggttgcggataacgctgccgccaagcctctcatcactaccctactccctaagatgattgcacgcatcaacgactggtttgaggaagtgaaagctaagcgcggcaagcgcccgacagccttccagttcctgcaagaaatcaagccggaagccgtagcgtacatcaccattaagaccactctggcttgcctaaccagtgcggacaatacaaccgttcaggctgtagcaagcgcaatcggtcgggccattgaggacgaggctcgcttcggtcgtatccgtgaccttgaagctaagcacttcaagaagaacgttgaggaacaactcaacaagcgcgtagggcacgtctacaagaaagcatttatgcaagttgtcgagcacgacatgctctctaagggtctactcggtggcgaggcgtggtcttcgtggcataaggaagactctattcatgtaggagtacgctgcatcgagatgctcattgagtcaaccggaatggttagcttacaccgccaaaatgctggcgtagtaggtcaagactctgagactatcgaactcgcacctgaatacgctgaggctatcgcaacccgtgcaggtgcgctggctggcatctctccgatgttccaaccttgcgtagttcctcctaagccgtggactggcattactggtggtggctattgggctgcggggcgcaaacccctgcagttagtacgtactcgcagtctggcggcgcttcgccgctatgaagaagtgtcgatgccggaggtcatcaaagcagtcaacattgcgcagaatacagcatggcgtattaacaagaaagttctcgacgtagcgaataccatcacccaatggcagcactgtccagtcgcggatgtgcctgcgatggatcgtggcgaaatgccagctcgtccgttggacatcgataccaacgagattgcacttaaagcgtggaagaaagaagcttccgcgttctaccgcaaagacaaagcacgcgttagccgtcgtctgtcaatggagtttatgttatctcaggcgaacaagtttgcgaattatgaggcaatctggtttccgtataacatggattggcgtgggcgcgtgtacgctgtcccgatgttcaatcctcagggcaacgatatgacgaaaggcctgctgacctttgcgcaggagaaacccattggtgaagacggcttctattggctcaagattcatggcgcaaatacagctggagtggataaagtaccgtttccacaacgcatcaaatttgttgaggataaccatacgaatattatggaatgcgcgaaagcaccgctggaaaacacttggtgggcggaacaggactcgccgttctgttttctggcgttctgctttgagtatgctggcgtcatcaatagtggtctgtcgtacaactgtagcttgcctctggcatttgatggtagttgctccggcctgcaacatttctcagcgatgttacgcgacgaaattggcggcaaagctgtgaatctcctcccatctgcggaataccaggatatttatcgtatcgtcagcgacaaagttaacgagatgctgaaacaagatctgattaacggtacctctaccaccgtggaaacggtgactgataagaagacaggcgaaattacccaacgcacgaaatacgggaccaaagttatggcacagtggtggttagaacacggtgtgaatcgtggcgtcacgaaacgctcggttatgactttggtgtatgggagcaaagagtttggattccgcgatcaagtgctgagtgacaccattcaaccggcgatcgataacggcaaaggtgacatgtttctgaatccgaatcaggctgctggttacatggcgaaactgatctggaacgcagtgtccgggaccgtagtcgcagcagttgaggcgatgaactggctgaaaagtgcggcgaaattacttgctgctgaagtgaaggatcctaagacggatacagttctgcgtggccgctgcgcagtacattgggtgactcccgacggcttccctgtgtggcaggaatacaagaagcctattcagacgcgcttgaacctgatgttcctcggtcagttccgcttacagcctaccattaacaccaacaaagatagcgagattgatgcacacaaacaggagtctggtatcgctcctaactttgtacacagccaagacggtaaccaccttcgtatgactgtagtgtgggcacacgagaagtacggaatcgaatcttttgcactgattcacgactccttcggtaccattccggctgacgctgcgaacctgttcaaagcagtgcgcgaaactttcgttgacacatatgagtcttgtgatgtactggctgatttctacgaccagttcgctgaccagttgcacgagtctcaacgcgacaaaatgccagcacttccggctaaaggtaacttgaacctccgtgacatcttaaaatcggacttcgcgttcgcg

SEQ ID NO: 1426 - protein, 890 aa, synthetic construct
  REGION 1..890: note = Variant of RNA polymerase
MHHHHHHMNTINIAKNDFSDIELAAIPFNTLADHYGERLAREQLALEHESYEMGEARFRKMFERQLKAGEVADNAAAKPLITTLLPKMIARINDWFEEVKAKRGKRPTAFQFLQEIKPEAVAYITIKTTLACLTSADNTTVQAVASAIGRAIEDEARFGRIRDLEAKHFKKNVEEQLNKRVGHVYKKAFMQVVEHDMLSKGLLGGEAWSSWHKEDSIHVGVRCIEMLIESTGMVSLHRQNAGVVGQDSETIELAPEYAEAIATRAGALAGISPMFQPCVVPPKPWTGITGGGYWAAGRKPLQLVRTRSLAALRRYEEVSMPEVIKAVNIAQNTAWRINKKVLDVANTITQWQHCPVADVPAMDRGEMPARPLDIDTNEIALKAWKKEASAFYRKDKARVSRRLSMEFMLSQANKFANYEAIWFPYNMDWRGRVYAVPMFNPQGNDMTKGLLTFAQEKPIGEDGFYWLKIHGANTAGVDKVPFPQRIKFVEDNHTNIMECAKAPLENTWWAEQDSPFCFLAFCFEYAGVINSGLSYNCSLPLAFDGSCSGLQHFSAMLRDEIGGKAVNLLPSAEYQDIYRIVSDKVNEMLKQDLINGTSTTVETVTDKKTGEITQRTKYGTKVMAQWWLEHGVNRGVTKRSVMTLVYGSKEFGFRDQVLSDTIQPAIDNGKGDMFLNPNQAAGYMAKLIWNAVSGTVVAAVEAMNWLKSAAKLLAAEVKDPKTDTVLRGRCAVHWVTPDGFPVWQEYKKPIQTRLNLMFLGQFRLQPTINTNKDSEIDAHKQESGIAPNFVHSQDGNHLRMTVVWAHEKYGIESFALIHDSFGTIPADAANLFKAVRETFVDTYESCDVLADFYDQFADQLHESQRDKMPALPAKGNLNLRDILKSDFAFA

SEQ ID NO: 1427 - DNA, 2670 bp, synthetic construct
  misc_feature 1..2670: note = Variant of RNA polymerase
  source 1..2670: mol_type = other DNA
atgcaccatcaccatcaccatatgaacacgattaacattgctaagaacgacttctctgacatcgaactggctgctatcccgttcaacactctggctgaccattacggtgagcgtttagctcgcgaacagttggcccttgagcatgagtcttacgagatgggtgaagcacgcttccgcaagatgtttgagcgtcaacttaaagctggtgaggttgcggataacgctgccgccaagcctctcatcactaccctactccctaagatgattgcacgcatcaacgactggtttgaggaagtgaaagctaagcgcggcaagcgcccgacagccttccagttcctgcaagaaatcaagccggaagccgtagcgtacatcaccattaagaccactctggcttgcctaaccagtgcggacaatacaaccgttcaggctgtagcaagcgcaatcggtcgggccattgaggacgaggctcgcttcggtcgtatccgtgaccttgaagctaagcacttcaagaagaacgttgaggaacaactcaacaagcgcgtagggcacgtctacaagaaagcatttatgcaagttgtcgagcacgacatgctctctaagggtctactcggtggcgaggcgtggtcttcgtggcataaggaagactctattcatgtaggagtacgctgcatcgagatgctcattgagtcaaccggaatggttagcttacaccgccaaaatgctggcgtagtaggtcaagactctgagactatcgaactcgcacctgaatacgctgaggctatcgcaacccgtgcaggtgcgctggctggcatctctccgatgttccaaccttgcgtagttcctcctaagccgtggactggcattactggtggtggctattgggctgcggggcgcaaacccctgcagttagtacgtactcgcagtctggcggcgcttcgccgctatgaagaagtgtcgatgccggaggtcatcaaagcagtcaacattgcgcagaatacagcatggcgtattaacaagaaagttctcgacgtagcgaataccatcacccaatggcagcactgtccagtcgcggatgtgcctgcgatggatcgtggcgaaatgccagctcgtccgttggacatcgataccaacgagattgcacttaaagcgtggaagaaagaagcttccgcgttctaccgcaaagacaaagcacgcgttagccgtcgtctgtcaatggagtttatgttatctcaggcgaacaagtttgcgaattatgaggcaatctggtttccgcaaaacatggattggcgtgggcgcgtgtacgctgtcccgatgttcaatcctcagggcaacgatatgacgaaaggcctgctgacctttgcgcaggagaaacccattggtgaagacggcttctattggctcaagattcatggcgcaaatacagctggagtggataaagtaccgtttccacaacgcatcaaatttgttgaggataaccatacgaatattatggaatgcgcgaaagcaccgctggaaaacacttggtgggcggaacaggactcgccgttctgttttctggcgttctgctttgagtatgctggcgtcatcaatagtggtctgtcgtacaactgtagcttgcctctggcatttgatggtagttgctccggcctgcaacatttctcagcgatgttacgcgacgaaattggcggcaaagctgtgaatctcctcccatctgcggaataccaggatatttatcgtatcgtcagcgacaaagttaacgagatgctgaaacaagatctgattaacggtacctctaccaccgtggaaacggtgactgataagaagacaggcgaaattacccaacgcacgaaatacgggaccaaagttatggcacagtggtggttagaacacggtgtgaatcgtggcgtcacgaaacgctcggttatgactttggtgtatgggagcaaagagtttggattccgcgatcaagtgctgagtgacaccattcaaccggcgatcgattacggcaaaggtgacatgtttctgaatccgaatcaggctgctggttacatggcgaaactgatctggaacgcagtgtccgggaccgtagtcgcagcagttgaggcgatgaactggctgaaaagtgcggcgaaattacttgctgctgaagtgaaggatcctaagacggatacagttctgcgtggccgctgcgcagtacattgggtgactcccgacggcttccctgtgtggcaggaatacaagaagcctattcagacgcgcttgaacctgatgttcctcggtcagttccgcttacagcctaccattaacaccaacaaagatagcgagattgatgcacacaaacaggagtctggtatcgctcctaactttgtacacagccaagacggtaaccaccttcgtatgactgtagtgtgggcacacgagaagtacggaatcgaatcttttgcactgattcacgactccttcggtaccattccggctgacgctgcgaacctgttcaaagcagtgcgcgaaactttcgttgacacatatgagtcttgtgatgtactggctgatttctacgaccagttcgctgaccagttgcacgagtctcaacgcgacaaaatgccagcacttccggctaaaggtaacttgaacctccgtgacatcttaaaatcggacttcgcgttcgcg

SEQ ID NO: 1428 - protein, 890 aa, synthetic construct
  REGION 1..890: note = Variant of RNA polymerase
MHHHHHHMNTINIAKNDFSDIELAAIPFNTLADHYGERLAREQLALEHESYEMGEARFRKMFERQLKAGEVADNAAAKPLITTLLPKMIARINDWFEEVKAKRGKRPTAFQFLQEIKPEAVAYITIKTTLACLTSADNTTVQAVASAIGRAIEDEARFGRIRDLEAKHFKKNVEEQLNKRVGHVYKKAFMQVVEHDMLSKGLLGGEAWSSWHKEDSIHVGVRCIEMLIESTGMVSLHRQNAGVVGQDSETIELAPEYAEAIATRAGALAGISPMFQPCVVPPKPWTGITGGGYWAAGRKPLQLVRTRSLAALRRYEEVSMPEVIKAVNIAQNTAWRINKKVLDVANTITQWQHCPVADVPAMDRGEMPARPLDIDTNEIALKAWKKEASAFYRKDKARVSRRLSMEFMLSQANKFANYEAIWFPQNMDWRGRVYAVPMFNPQGNDMTKGLLTFAQEKPIGEDGFYWLKIHGANTAGVDKVPFPQRIKFVEDNHTNIMECAKAPLENTWWAEQDSPFCFLAFCFEYAGVINSGLSYNCSLPLAFDGSCSGLQHFSAMLRDEIGGKAVNLLPSAEYQDIYRIVSDKVNEMLKQDLINGTSTTVETVTDKKTGEITQRTKYGTKVMAQWWLEHGVNRGVTKRSVMTLVYGSKEFGFRDQVLSDTIQPAIDYGKGDMFLNPNQAAGYMAKLIWNAVSGTVVAAVEAMNWLKSAAKLLAAEVKDPKTDTVLRGRCAVHWVTPDGFPVWQEYKKPIQTRLNLMFLGQFRLQPTINTNKDSEIDAHKQESGIAPNFVHSQDGNHLRMTVVWAHEKYGIESFALIHDSFGTIPADAANLFKAVRETFVDTYESCDVLADFYDQFADQLHESQRDKMPALPAKGNLNLRDILKSDFAFA

SEQ ID NO: 1429 - DNA, 2670 bp, synthetic construct
  misc_feature 1..2670: note = Variant of RNA polymerase
  source 1..2670: mol_type = other DNA
atgcaccatcaccatcaccatatgaacacgattaacattgctaagaacgacttctctgacatcgaactggctgctatcccgttcaacactctggctgaccattacggtgagcgtttagctcgcgaacagttggcccttgagcatgagtcttacgagatgggtgaagcacgcttccgcaagatgtttgagcgtcaacttaaagctggtgaggttgcggataacgctgccgccaagcctctcatcactaccctactccctaagatgattgcacgcatcaacgactggtttgaggaagtgaaagctaagcgcggcaagcgcccgacagccttccagttcctgcaagaaatcaagccggaagccgtagcgtacatcaccattaagaccactctggcttgcctaaccagtgcggacaatacaaccgttcaggctgtagcaagcgcaatcggtcgggccattgaggacgaggctcgcttcggtcgtatccgtgaccttgaagctaagcacttcaagaagaacgttgaggaacaactcaacaagcgcgtagggcacgtctacaagaaagcatttatgcaagttgtcgagcacgacatgctctctaagggtctactcggtggcgaggcgtggtcttcgtggcataaggaagactctattcatgtaggagtacgctgcatcgagatgctcattgagtcaaccggaatggttagcttacaccgccaaaatgctggcgtagtaggtcaagactctgagactatcgaactcgcacctgaatacgctgaggctatcgcaacccgtgcaggtgcgctggctggcatctctccgatgttccaaccttgcgtagttcctcctaagccgtggactggcattactggtggtggctattgggctgcggggcgcaaacccctgcagttagtacgtactcgcagtctggcggcgcttcgccgctatgaagaagtgtcgatgccggaggtcatcaaagcagtcaacattgcgcagaatacagcatggcgtattaacaagaaagttctcgacgtagcgaataccatcacccaatggcagcactgtccagtcgcggatgtgcctgcgatggatcgtggcgaaatgccagctcgtccgttggacatcgataccaacgagattgcacttaaagcgtggaagaaagaagcttccgcgttctaccgcaaagacaaagcacgcgttagccgtcgtctgtcaatggagtttatgttatctcaggcgaacaagtttgcgaattatgaggcaatctggtttccgcaaaacatggattggcgtgggcgcgtgtacgctgtcccgatgttcaatcctcagggcaacgatatgacgaaaggcctgctgacctttgcgcaggagaaacccattggtgaagacggcttctattggctcaagattcatggcgcaaatacagctggagtggataaagtaccgtttccacaacgcatcaaatttgttgaggataaccatacgaatattatggaatgcgcgaaagcaccgctggaaaacacttggtgggcggaacaggactcgccgttctgttttctggcgttctgctttgagtatgctggcgtcatcaatagtggtctgtcgtacaactgtagcttgcctctggcatttgatggtagttgctccggcctgcaacatttctcagcgatgttacgcgacgaaattggcggcaaagctgtgaatctcctcccatctgcggaataccaggatatttatcgtatcgtcagcgacaaagttaacgagatgctgaaacaagatctgattaacggtacctctaccaccgtggaaacggtgactgataagaagacaggcgaaattacccaacgcacgaaatacgggaccaaagttatggcacagtggtggttagaacacggtgtgaatcgtggcgtcacgaaacgctcggttatgactttggtgtatgggagcaaagagtttggattccgcgatcaagtgctgagtgacaccattcaaccggcgatcgataacggcaaaggtgacatgtttctgaatccgaatcaggctgctggttacatggcgaaactgatctggaacgcagtgtccgggaccgtagtcgcagcagttgaggcgatgaactggctgaaaagtgcggcgaaattacttgctgctgaagtgaaggatcctaagacggatacagttctgcgtggccgccaggcagtacattgggtgactcccgacggcttccctgtgtggcaggaatacaagaagcctattcagacgcgcttgaacctgatgttcctcggtcagttccgcttacagcctaccattaacaccaacaaagatagcgagattgatgcacacaaacaggagtctggtatcgctcctaactttgtacacagccaagacggtaaccaccttcgtatgactgtagtgtgggcacacgagaagtacggaatcgaatcttttgcactgattcacgactccttcggtaccattccggctgacgctgcgaacctgttcaaagcagtgcgcgaaactttcgttgacacatatgagtcttgtgatgtactggctgatttctacgaccagttcgctgaccagttgcacgagtctcaacgcgacaaaatgccagcacttccggctaaaggtaacttgaacctccgtgacatcttaaaatcggacttcgcgttcgcg

SEQ ID NO: 1430 - protein, 890 aa, synthetic construct
  REGION 1..890: note = Variant of RNA polymerase
MHHHHHHMNTINIAKNDFSDIELAAIPFNTLADHYGERLAREQLALEHESYEMGEARFRKMFERQLKAGEVADNAAAKPLITTLLPKMIARINDWFEEVKAKRGKRPTAFQFLQEIKPEAVAYITIKTTLACLTSADNTTVQAVASAIGRAIEDEARFGRIRDLEAKHFKKNVEEQLNKRVGHVYKKAFMQVVEHDMLSKGLLGGEAWSSWHKEDSIHVGVRCIEMLIESTGMVSLHRQNAGVVGQDSETIELAPEYAEAIATRAGALAGISPMFQPCVVPPKPWTGITGGGYWAAGRKPLQLVRTRSLAALRRYEEVSMPEVIKAVNIAQNTAWRINKKVLDVANTITQWQHCPVADVPAMDRGEMPARPLDIDTNEIALKAWKKEASAFYRKDKARVSRRLSMEFMLSQANKFANYEAIWFPQNMDWRGRVYAVPMFNPQGNDMTKGLLTFAQEKPIGEDGFYWLKIHGANTAGVDKVPFPQRIKFVEDNHTNIMECAKAPLENTWWAEQDSPFCFLAFCFEYAGVINSGLSYNCSLPLAFDGSCSGLQHFSAMLRDEIGGKAVNLLPSAEYQDIYRIVSDKVNEMLKQDLINGTSTTVETVTDKKTGEITQRTKYGTKVMAQWWLEHGVNRGVTKRSVMTLVYGSKEFGFRDQVLSDTIQPAIDNGKGDMFLNPNQAAGYMAKLIWNAVSGTVVAAVEAMNWLKSAAKLLAAEVKDPKTDTVLRGRQAVHWVTPDGFPVWQEYKKPIQTRLNLMFLGQFRLQPTINTNKDSEIDAHKQESGIAPNFVHSQDGNHLRMTVVWAHEKYGIESFALIHDSFGTIPADAANLFKAVRETFVDTYESCDVLADFYDQFADQLHESQRDKMPALPAKGNLNLRDILKSDFAFA

SEQ ID NO: 1431 - DNA, 2670 bp, synthetic construct
  misc_feature 1..2670: note = Variant of RNA polymerase
  source 1..2670: mol_type = other DNA
atgcaccatcaccatcaccatatgaacacgattaacattgctaagaacgacttctctgacatcgaactggctgctatcccgttcaacactctggctgaccattacggtgagcgtttagctcgcgaacagttggcccttgagcatgagtcttacgagatgggtgaagcacgcttccgcaagatgtttgagcgtcaacttaaagctggtgaggttgcggataacgctgccgccaagcctctcatcactaccctactccctaagatgattgcacgcatcaacgactggtttgaggaagtgaaagctaagcgcggcaagcgcccgacagccttccagttcctgcaagaaatcaagccggaagccgtagcgtacatcaccattaagaccactctggcttgcctaaccagtgcggacaatacaaccgttcaggctgtagcaagcgcaatcggtcgggccattgaggacgaggctcgcttcggtcgtatccgtgaccttgaagctaagcacttcaagaagaacgttgaggaacaactcaacaagcgcgtagggcacgtctacaagaaagcatttatgcaagttgtcgagcacgacatgctctctaagggtctactcggtggcgaggcgtggtcttcgtggcataaggaagactctattcatgtaggagtacgctgcatcgagatgctcattgagtcaaccggaatggttagcttacaccgccaaaatgctggcgtagtaggtcaagactctgagactatcgaactcgcacctgaatacgctgaggctatcgcaacccgtgcaggtgcgctggctggcatctctccgatgttccaaccttgcgtagttcctcctaagccgtggactggcattactggtggtggctattgggctgcggggcgcaaacccctgcagttagtacgtactcgcagtctggcggcgcttcgccgctatgaagaagtgtcgatgccggaggtcatcaaagcagtcaacattgcgcagaatacagcatggcgtattaacaagaaagttctcgacgtagcgaataccatcacccaatggcagcactgtccagtcgcggatgtgcctgcgatggatcgtggcgaaatgccagctcgtccgttggacatcgataccaacgagattgcacttaaagcgtggaagaaagaagcttccgcgttctaccgcaaagacaaagcacgcgttagccgtcgtctgtcaatggagtttatgttatctcaggcgaacaagtttgcgaattatgaggcaatctggtttccgcaaaacatggattggcgtgggcgcgtgtacgctgtcccgatgttcaatcctcagggcaacgatatgacgaaaggcctgctgacctttgcgcaggagaaacccattggtgaagacggcttctattggctcaagattcatggcgcaaatacagctggagtggataaagtaccgtttccacaacgcatcaaatttgttgaggataaccatacgaatattatggaatgcgcgaaagcaccgctggaaaacacttggtgggcggaacaggactcgccgttctgttttctggcgttctgctttgagtatgctggcgtcatcaatagtggtctgtcgtacaactgtagcttgcctctggcatttgatggtagttgctccggcctgcaacatttctcagcgatgttacgcgacgaaattggcggcaaagctgtgaatctcctcccatctgcggaataccaggatatttatcgtatcgtcagcgacaaagttaacgagatgctgaaagccgatctgattaacggtacctctaccaccgtggaaacggtgactgataagaagacaggcgaaattacccaacgcacgaaatacgggaccaaagttatggcacagtggtggttagaacacggtgtgaatcgtggcgtcacgaaacgctcggttatgactttggtgtatgggagcaaagagtttggattccgcgatcaagtgctgagtgacaccattcaaccggcgatcgataacggcaaaggtgacatgtttctgaatccgaatcaggctgctggttacatggcgaaactgatctggaacgcagtgtccgggaccgtagtcgcagcagttgaggcgatgaactggctgaaaagtgcggcgaaattacttgctgctgaagtgaaggatcctaagacggatacagttctgcgtggccgctgcgcagtacattgggtgactcccgacggcttccctgtgtggcaggaatacaagaagcctattcagacgcgcttgaacctgatgttcctcggtcagttccgcttacagcctaccattaacaccaacaaagatagcgagattgatgcacacaaacaggagtctggtatcgctcctaactttgtacacagccaagacggtaaccaccttcgtatgactgtagtgtgggcacacgagaagtacggaatcgaatcttttgcactgattcacgactccttcggtaccattccggctgacgctgcgaacctgttcaaagcagtgcgcgaaactttcgttgacacatatgagtcttgtgatgtactggctgatttctacgaccagttcgctgaccagttgcacgagtctcaacgcgacaaaatgccagcacttccggctaaaggtaacttgaacctccgtgacatcttaaaatcggacttcgcgttcgcg

SEQ ID NO: 1432 - protein, 890 aa, synthetic construct
  REGION 1..890: note = Variant of RNA polymerase
MHHHHHHMNTINIAKNDFSDIELAAIPFNTLADHYGERLAREQLALEHESYEMGEARFRKMFERQLKAGEVADNAAAKPLITTLLPKMIARINDWFEEVKAKRGKRPTAFQFLQEIKPEAVAYITIKTTLACLTSADNTTVQAVASAIGRAIEDEARFGRIRDLEAKHFKKNVEEQLNKRVGHVYKKAFMQVVEHDMLSKGLLGGEAWSSWHKEDSIHVGVRCIEMLIESTGMVSLHRQNAGVVGQDSETIELAPEYAEAIATRAGALAGISPMFQPCVVPPKPWTGITGGGYWAAGRKPLQLVRTRSLAALRRYEEVSMPEVIKAVNIAQNTAWRINKKVLDVANTITQWQHCPVADVPAMDRGEMPARPLDIDTNEIALKAWKKEASAFYRKDKARVSRRLSMEFMLSQANKFANYEAIWFPQNMDWRGRVYAVPMFNPQGNDMTKGLLTFAQEKPIGEDGFYWLKIHGANTAGVDKVPFPQRIKFVEDNHTNIMECAKAPLENTWWAEQDSPFCFLAFCFEYAGVINSGLSYNCSLPLAFDGSCSGLQHFSAMLRDEIGGKAVNLLPSAEYQDIYRIVSDKVNEMLKADLINGTSTTVETVTDKKTGEITQRTKYGTKVMAQWWLEHGVNRGVTKRSVMTLVYGSKEFGFRDQVLSDTIQPAIDNGKGDMFLNPNQAAGYMAKLIWNAVSGTVVAAVEAMNWLKSAAKLLAAEVKDPKTDTVLRGRCAVHWVTPDGFPVWQEYKKPIQTRLNLMFLGQFRLQPTINTNKDSEIDAHKQESGIAPNFVHSQDGNHLRMTVVWAHEKYGIESFALIHDSFGTIPADAANLFKAVRETFVDTYESCDVLADFYDQFADQLHESQRDKMPALPAKGNLNLRDILKSDFAFA

SEQ ID NO: 1433 - DNA, 2670 bp, synthetic construct
  misc_feature 1..2670: note = Variant of RNA polymerase
  source 1..2670: mol_type = other DNA
atgcaccatcaccatcaccatatgaacacgattaacattgctaagaacgacttctctgacatcgaactggctgctatcccgttcaacactctggctgaccattacggtgagcgtttagctcgcgaacagttggcccttgagcatgagtcttacgagatgggtgaagcacgcttccgcaagatgtttgagcgtcaacttaaagctggtgaggttgcggataacgctgccgccaagcctctcatcactaccctactccctaagatgattgcacgcatcaacgactggtttgaggaagtgaaagctaagcgcggcaagcgcccgacagccttccagttcctgcaagaaatcaagccggaagccgtagcgtacatcaccattaagaccactctggcttgcctaaccagtgcggacaatacaaccgttcaggctgtagcaagcgcaatcggtcgggccattgaggacgaggctcgcttcggtcgtatccgtgaccttgaagctaagcacttcaagaagaacgttgaggaacaactcaacaagcgcgtagggcacgtctacaagaaagcatttatgcaagttgtcgagcacgacatgctctctaagggtctactcggtggcgaggcgtggtcttcgtggcataaggaagactctattcatgtaggagtacgctgcatcgagatgctcattgagtcaaccggaatggttagcttacaccgccaaaatgctggcgtagtaggtcaagactctgagactatcgaactcgcacctgaatacgctgaggctatcgcaacccgtgcaggtgcgctggctggcatctctccgatgttccaaccttgcgtagttcctcctaagccgtggactggcattactggtggtggctattgggctgcggggcgcaaacccctgcagttagtacgtactcgcagtctggcggcgcttcgccgctatgaagaagtgtcgatgccggaggtcatcaaagcagtcaacattgcgcagaatacagcatggcgtattaacaagaaagttctcgcagtagcgaataccatcacccaatggcagcactgtccagtcgcggatgtgcctgcgatggatcgtggcgaaatgccagctcgtccgttggacatcgataccaacgagattgcacttaaagcgtggaagaaagaagcttccgcgttctaccgcaaagacaaagcacgcgttagccgtcgtctgtcaatggagtttatgttatctcaggcgaacaagtttgcgaattatgaggcaatctggtttccgcaaaacatggattggcgtgggcgcgtgtacgctgtcccgatgttcaatcctcagggcaacgatatgacgaaaggcctgctgacctttgcgcaggagaaacccattggtgaagacggcttctattggctcaagattcatggcgcaaatacagctggagtggataaagtaccgtttccacaacgcatcaaatttgttgaggataaccatacgaatattatggaatgcgcgaaagcaccgctggaaaacacttggtgggcggaacaggactcgccgttctgttttctggcgttctgctttgagtatgctggcgtcatcaatagtggtctgtcgtacaactgtagcttgcctctggcatttgatggtagttgctccggcctgcaacatttctcagcgatgttacgcgacgaaattggcggcaaagctgtgaatctcctcccatctgcggaataccaggatatttatcgtatcgtcagcgacaaagttaacgagatgctgaaacaagatctgattaacggtacctctaccaccgtggaaacggtgactgataagaagacaggcgaaattacccaacgcacgaaatacgggaccaaagttatggcacagtggtggttagaacacggtgtgaatcgtggcgtcacgaaacgctcggttatgactttggtgtatgggagcaaagagtttggattccgcgatcaagtgctgagtgacaccattcaaccggcgatcgataacggcaaaggtgacatgtttctgaatccgaatcaggctgctggttacatggcgaaactgatctggaacgcagtgtccgggaccgtagtcgcagcagttgaggcgatgaactggctgaaaagtgcggcgaaattacttgctgctgaagtgaaggatcctaagacggatacagttctgcgtggccgctgcgcagtacattgggtgactcccgacggcttccctgtgtggcaggaatacaagaagcctattcagacgcgcttgaacctgatgttcctcggtcagttccgcttacagcctaccattaacaccaacaaagatagcgagattgatgcacacaaacaggagtctggtatcgctcctaactttgtacacagccaagacggtaaccaccttcgtatgactgtagtgtgggcacacgagaagtacggaatcgaatcttttgcactgattcacgactccttcggtaccattccggctgacgctgcgaacctgttcaaagcagtgcgcgaaactttcgttgacacatatgagtcttgtgatgtactggctgatttctacgaccagttcgctgaccagttgcacgagtctcaacgcgacaaaatgccagcacttccggctaaaggtaacttgaacctccgtgacatcttaaaatcggacttcgcgttcgcg

SEQ ID NO: 1434 - protein, 890 aa, synthetic construct
  REGION 1..890: note = Variant of RNA polymerase
MHHHHHHMNTINIAKNDFSDIELAAIPFNTLADHYGERLAREQLALEHESYEMGEARFRKMFERQLKAGEVADNAAAKPLITTLLPKMIARINDWFEEVKAKRGKRPTAFQFLQEIKPEAVAYITIKTTLACLTSADNTTVQAVASAIGRAIEDEARFGRIRDLEAKHFKKNVEEQLNKRVGHVYKKAFMQVVEHDMLSKGLLGGEAWSSWHKEDSIHVGVRCIEMLIESTGMVSLHRQNAGVVGQDSETIELAPEYAEAIATRAGALAGISPMFQPCVVPPKPWTGITGGGYWAAGRKPLQLVRTRSLAALRRYEEVSMPEVIKAVNIAQNTAWRINKKVLAVANTITQWQHCPVADVPAMDRGEMPARPLDIDTNEIALKAWKKEASAFYRKDKARVSRRLSMEFMLSQANKFANYEAIWFPQNMDWRGRVYAVPMFNPQGNDMTKGLLTFAQEKPIGEDGFYWLKIHGANTAGVDKVPFPQRIKFVEDNHTNIMECAKAPLENTWWAEQDSPFCFLAFCFEYAGVINSGLSYNCSLPLAFDGSCSGLQHFSAMLRDEIGGKAVNLLPSAEYQDIYRIVSDKVNEMLKQDLINGTSTTVETVTDKKTGEITQRTKYGTKVMAQWWLEHGVNRGVTKRSVMTLVYGSKEFGFRDQVLSDTIQPAIDNGKGDMFLNPNQAAGYMAKLIWNAVSGTVVAAVEAMNWLKSAAKLLAAEVKDPKTDTVLRGRCAVHWVTPDGFPVWQEYKKPIQTRLNLMFLGQFRLQPTINTNKDSEIDAHKQESGIAPNFVHSQDGNHLRMTVVWAHEKYGIESFALIHDSFGTIPADAANLFKAVRETFVDTYESCDVLADFYDQFADQLHESQRDKMPALPAKGNLNLRDILKSDFAFA

SEQ ID NO: 1435 - DNA, 2670 bp, synthetic construct
  misc_feature 1..2670: note = Variant of RNA polymerase
  source 1..2670: mol_type = other DNA
atgcaccatcaccatcaccatatgaacacgattaacattgctaagaacgacttctctgacatcgaactggctgctatcccgttcaacactctggctgaccattacggtgagcgtttagctcgcgaacagttggcccttgagcatgagtcttacgagatgggtgaagcacgcttccgcaagatgtttgagcgtcaacttaaagctggtgaggttgcggataacgctgccgccaagcctctcatcactaccctactccctaagatgattgcacgcatcaacgactggtttgaggaagtgaaagctaagcgcggcaagcgcccgacagccttccagttcctgcaagaaatcaagccggaagccgtagcgtacatcaccattaagaccactctggcttgcctaaccagtgcggacaatacaaccgttcaggctgtagcaagcgcaatcggtcgggccattgaggacgaggctcgcttcggtcgtatccgtgaccttgaagctaagcacttcaagaagaacgttgaggaacaactcaacaagcgcgtagggcacgtctacaagaaagcatttatgcaagttgtcgagcacgacatgctctctaagggtctactcggtggcgaggcgtggtcttcgtggcataaggaagactctattcatgtaggagtacgctgcatcgagatgctcattgagtcaaccggaatggttagcttacaccgccaaaatgctggcgtagtaggtcaagactctgagactatcgaactcgcacctgaatacgctgaggctatcgcaacccgtgcaggtgcgctggctggcatctctccgatgttccaaccttgcgtagttcctcctaagccgtggactggcattactggtggtggctattgggctgcggggcgcaaacccctgcagttagtacgtactcgcagtctggcggcgcttcgccgctatgaagaagtgtcgatgccggaggtcatcaaagcagtcaacattgcgcagaatacagcatggcgtattaacaagaaagttctcgacgtagcgaataccatcacccaatggcagcactgtccagtcgcggatgtgcctgcgatggatcgtggcgaaatgccagctcgtccgttggacatcgataccaacgagattgcacttaaagcgtggaagaaagaagcttccgcgttctaccgcaaagacaaagcacgcgttagccgtcgtctgtcaatggagtttatgttatctcaggcgaacaagtttgcgaattatgaggcaatctggtttccgcaaaacatggattggcgtgggcgcgtgtacgctgtcccgatgttcaatcctcagggcaacgatatgacgaaaggcctgctgacctttgcgcaggagaaacccattggtgaagacggcttctattggctcaagattcatggcgcaaatacagctggagtggataaagtaccgtttccacaacgcatcaaatttgttgaggataaccatacgaatattatggaatgcgcgaaagcaccgctggaaaacacttggtgggcggaacaggactcgccgttctgttttctggcgttctgctttgagtatgctggcgtcatcaatagtggtctgtcgtacaactgtagcttgcctctggcatttgatggtagttgctccggcctgcaacatttctcagcgatgttacgcgacgaaattggcggcaaagctgtgaatctcctcccatctgcggaataccaggatatttatcgtatcgtcagcgacaaagttaacgagatgctgaaacaagatctgattaacggtacctctaccaccgtggaaacggtgactgataagaagacaggcgaaattacccaacgcacgaaatacgggaccaaagttatggcacagtggtggttagaacacggtgtgaatcgtggcgtcacgaaacgctcggttatgactttggtgtatgggagcaaagagtttggattccgcgatcaagtgctgagtgacaccattcaaccggcgatcgattggggcaaaggtgacatgtttctgaatccgaatcaggctgctggttacatggcgaaactgatctggaacgcagtgtccgggaccgtagtcgcagcagttgaggcgatgaactggctgaaaagtgcggcgaaattacttgctgctgaagtgaaggatcctaagacggatacagttctgcgtggccgctgcgcagtacattgggtgactcccgacggcttccctgtgtggcaggaatacaagaagcctattcagacgcgcttgaacctgatgttcctcggtcagttccgcttacagcctaccattaacaccaacaaagatagcgagattgatgcacacaaacaggagtctggtatcgctcctaactttgtacacagccaagacggtaaccaccttcgtatgactgtagtgtgggcacacgagaagtacggaatcgaatcttttgcactgattcacgactccttcggtaccattccggctgacgctgcgaacctgttcaaagcagtgcgcgaaactttcgttgacacatatgagtcttgtgatgtactggctgatttctacgaccagttcgctgaccagttgcacgagtctcaacgcgacaaaatgccagcacttccggctaaaggtaacttgaacctccgtgacatcttaaaatcggacttcgcgttcgcg

SEQ ID NO: 1436 - protein, 890 aa, synthetic construct
  REGION 1..890: note = Variant of RNA polymerase
MHHHHHHMNTINIAKNDFSDIELAAIPFNTLADHYGERLAREQLALEHESYEMGEARFRKMFERQLKAGEVADNAAAKPLITTLLPKMIARINDWFEEVKAKRGKRPTAFQFLQEIKPEAVAYITIKTTLACLTSADNTTVQAVASAIGRAIEDEARFGRIRDLEAKHFKKNVEEQLNKRVGHVYKKAFMQVVEHDMLSKGLLGGEAWSSWHKEDSIHVGVRCIEMLIESTGMVSLHRQNAGVVGQDSETIELAPEYAEAIATRAGALAGISPMFQPCVVPPKPWTGITGGGYWAAGRKPLQLVRTRSLAALRRYEEVSMPEVIKAVNIAQNTAWRINKKVLDVANTITQWQHCPVADVPAMDRGEMPARPLDIDTNEIALKAWKKEASAFYRKDKARVSRRLSMEFMLSQANKFANYEAIWFPQNMDWRGRVYAVPMFNPQGNDMTKGLLTFAQEKPIGEDGFYWLKIHGANTAGVDKVPFPQRIKFVEDNHTNIMECAKAPLENTWWAEQDSPFCFLAFCFEYAGVINSGLSYNCSLPLAFDGSCSGLQHFSAMLRDEIGGKAVNLLPSAEYQDIYRIVSDKVNEMLKQDLINGTSTTVETVTDKKTGEITQRTKYGTKVMAQWWLEHGVNRGVTKRSVMTLVYGSKEFGFRDQVLSDTIQPAIDWGKGDMFLNPNQAAGYMAKLIWNAVSGTVVAAVEAMNWLKSAAKLLAAEVKDPKTDTVLRGRCAVHWVTPDGFPVWQEYKKPIQTRLNLMFLGQFRLQPTINTNKDSEIDAHKQESGIAPNFVHSQDGNHLRMTVVWAHEKYGIESFALIHDSFGTIPADAANLFKAVRETFVDTYESCDVLADFYDQFADQLHESQRDKMPALPAKGNLNLRDILKSDFAFA

SEQ ID NO: 1437 - DNA, 2670 bp, synthetic construct
  misc_feature 1..2670: note = Variant of RNA polymerase
  source 1..2670: mol_type = other DNA
atgcaccatcaccatcaccatatgaacacgattaacattgctaagaacgacttctctgacatcgaactggctgctatcccgttcaacactctggctgaccattacggtgagcgtttagctcgcgaacagttggcccttgagcatgagtcttacgagatgggtgaagcacgcttccgcaagatgtttgagcgtcaacttaaagctggtgaggttgcggataacgctgccgccaagcctctcatcactaccctactccctaagatgattgcacgcatcaacgactggtttgaggaagtgaaagctaagcgcggcaagcgcccgacagccttccagttcctgcaagaaatcaagccggaagccgtagcgtacatcaccattaagaccactctggcttgcctaaccagtgcggacaatacaaccgttcaggctgtagcaagcgcaatcggtcgggccattgaggacgaggctcgcttcggtcgtatccgtgaccttgaagctaagcacttcaagaagaacgttgaggaacaactcaacaagcgcgtagggcacgtctacaagaaagcatttatgcaagttgtcgagcacgacatgctctctaagggtctactcggtggcgaggcgtggtcttcgtggcataaggaagactctattcatgtaggagtacgctgcatcgagatgctcattgagtcaaccggaatggttagcttacaccgccaaaatgctggcgtagtaggtcaagactctgagactatcgaactcgcacctgaatacgctgaggctatcgcaacccgtgcaggtgcgctggctggcatctctccgatgttccaaccttgcgtagttcctcctaagccgtggactggcattactggtggtggctattgggctgcggggcgcaaacccctgcagttagtacgtactcgcagtctggcggcgcttcgccgctatgaagaagtgtcgatgccggaggtcatcaaagcagtcaacattgcgcagaatacagcatggcgtattaacaagaaagttctcgacgtagcgaataccatcacccaatggcagcactgtccagtcgcggatgtgcctgcgatggatcgtggcgaactgccagctcgtccgttggacatcgataccaacgagattgcacttaaagcgtggaagaaagaagcttccgcgttctaccgcaaagacaaagcacgcgttagccgtcgtctgtcaatggagtttatgttatctcaggcgaacaagtttgcgaattatgaggcaatctggtttccgcaaaacatggattggcgtgggcgcgtgtacgctgtcccgatgttcaatcctcagggcaacgatatgacgaaaggcctgctgacctttgcgcaggagaaacccattggtgaagacggcttctattggctcaagattcatggcgcaaatacagctggagtggataaagtaccgtttccacaacgcatcaaatttgttgaggataaccatacgaatattatggaatgcgcgaaagcaccgctggaaaacacttggtgggcggaacaggactcgccgttctgttttctggcgttctgctttgagtatgctggcgtcatcaatagtggtctgtcgtacaactgtagcttgcctctggcatttgatggtagttgctccggcctgcaacatttctcagcgatgttacgcgacgaaattggcggcaaagctgtgaatctcctcccatctgcggaataccaggatatttatcgtatcgtcagcgacaaagttaacgagatgctgaaacaagatctgattaacggtacctctaccaccgtggaaacggtgactgataagaagacaggcgaaattacccaacgcacgaaatacgggaccaaagttatggcacagtggtggttagaacacggtgtgaatcgtggcgtcacgaaacgctcggttatgactttggtgtatgggagcaaagagtttggattccgcgatcaagtgctgagtgacaccattcaaccggcgatcgataacggcaaaggtgacatgtttctgaatccgaatcaggctgctggttacatggcgaaactgatctggaacgcagtgtccgggaccgtagtcgcagcagttgaggcgatgaactggctgaaaagtgcggcgaaattacttgctgctgaagtgaaggatcctaagacggatacagttctgcgtggccgctgcgcagtacattgggtgactcccgacggcttccctgtgtggcaggaatacaagaagcctattcagacgcgcttgaacctgatgttcctcggtcagttccgcttacagcctaccattaacaccaacaaagatagcgagattgatgcacacaaacaggagtctggtatcgctcctaactttgtacacagccaagacggtaaccaccttcgtatgactgtagtgtgggcacacgagaagtacggaatcgaatcttttgcactgattcacgactccttcggtaccattccggctgacgctgcgaacctgttcaaagcagtgcgcgaaactttcgttgacacatatgagtcttgtgatgtactggctgatttctacgaccagttcgctgaccagttgcacgagtctcaacgcgacaaaatgccagcacttccggctaaaggtaacttgaacctccgtgacatcttaaaatcggacttcgcgttcgcg

SEQ ID NO: 1438 - protein, 890 aa, synthetic construct
  REGION 1..890: note = Variant of RNA polymerase
MHHHHHHMNTINIAKNDFSDIELAAIPFNTLADHYGERLAREQLALEHESYEMGEARFRKMFERQLKAGEVADNAAAKPLITTLLPKMIARINDWFEEVKAKRGKRPTAFQFLQEIKPEAVAYITIKTTLACLTSADNTTVQAVASAIGRAIEDEARFGRIRDLEAKHFKKNVEEQLNKRVGHVYKKAFMQVVEHDMLSKGLLGGEAWSSWHKEDSIHVGVRCIEMLIESTGMVSLHRQNAGVVGQDSETIELAPEYAEAIATRAGALAGISPMFQPCVVPPKPWTGITGGGYWAAGRKPLQLVRTRSLAALRRYEEVSMPEVIKAVNIAQNTAWRINKKVLDVANTITQWQHCPVADVPAMDRGELPARPLDIDTNEIALKAWKKEASAFYRKDKARVSRRLSMEFMLSQANKFANYEAIWFPQNMDWRGRVYAVPMFNPQGNDMTKGLLTFAQEKPIGEDGFYWLKIHGANTAGVDKVPFPQRIKFVEDNHTNIMECAKAPLENTWWAEQDSPFCFLAFCFEYAGVINSGLSYNCSLPLAFDGSCSGLQHFSAMLRDEIGGKAVNLLPSAEYQDIYRIVSDKVNEMLKQDLINGTSTTVETVTDKKTGEITQRTKYGTKVMAQWWLEHGVNRGVTKRSVMTLVYGSKEFGFRDQVLSDTIQPAIDNGKGDMFLNPNQAAGYMAKLIWNAVSGTVVAAVEAMNWLKSAAKLLAAEVKDPKTDTVLRGRCAVHWVTPDGFPVWQEYKKPIQTRLNLMFLGQFRLQPTINTNKDSEIDAHKQESGIAPNFVHSQDGNHLRMTVVWAHEKYGIESFALIHDSFGTIPADAANLFKAVRETFVDTYESCDVLADFYDQFADQLHESQRDKMPALPAKGNLNLRDILKSDFAFA

SEQ ID NO: 1439 - DNA, 2670 bp, synthetic construct
  misc_feature 1..2670: note = Variant of RNA polymerase
  source 1..2670: mol_type = other DNA
atgcaccatcaccatcaccatatgaacacgattaacattgctaagaacgacttctctgacatcgaactggctgctatcccgttcaacactctggctgaccattacggtgagcgtttagctcgcgaacagttggcccttgagcatgagtcttacgagatgggtgaagcacgcttccgcaagatgtttgagcgtcaacttaaagctggtgaggttgcggataacgctgccgccaagcctctcatcactaccctactccctaagatgattgcacgcatcaacgactggtttgaggaagtgaaagctaagcgcggcaagcgcccgacagccttccagttcctgcaagaaatcaagccggaagccgtagcgtacatcaccattaagaccactctggcttgcctaaccagtgcggacaatacaaccgttcaggctgtagcaagcgcaatcggtcgggccattgaggacgaggctcgcttcggtcgtatccgtgaccttgaagctaagcacttcaagaagaacgttgaggaacaactcaacaagcgcgtagggcacgtctacaagaaagcatttatgcaagttgtcgagcacgacatgctctctaagggtctactcggtggcgaggcgtggtcttcgtggcataaggaagactctattcatgtaggagtacgctgcatcgagatgctcattgagtcaaccggaatggttagcttacaccgccaaaatgctggcgtagtaggtcaagactctgagactatcgaactcgcacctgaatacgctgaggctatcgcaacccgtgcaggtgcgctggctggcatctctccgatgttccaaccttgcgtagttcctcctaagccgtggactggcattactggtggtggctattgggctgcggggcgcaaacccctgcagttagtacgtactcgcagtctggcggcgcttcgccgctatgaagaagtgtcgatgccggaggtcatcaaagcagtcaacattgcgcagaatacagcatggcgtattaacaagaaagttctcgacgtagcgaataccatcacccaatggcagcactgtccagtcgcggatgtgcctgcgatggatcgtggcgaaatgccagctcgtccgttggacatcgataccaacgagattgcacttaaagcgtggaagaaagaagcttccgcgttctaccgcaaagacaaagcacgcgttagccgtcgtctgtcaatggagtttatgttatctcaggcgaacaagtttgcgaattatgaggcaatctggtttccgcaaaacatggattggcgtgggcgcgtgtacgctgtcccgatgttcaatcctcagggcaacgatatgacgaaaggcctgctgacctttgcgcaggagaaacccattggtgaagacggcttctattggctcaagattcatggcgcaaatacagctggagtggataaagtaccgtttccacaacgcatcaaatttgttgaggataaccatacgaatattatggaatgcgcgaaagcaccgctggaaaacacttggtgggcggaacaggactcgccgttctgttttctggcgttctgctttgagtatgctggcgtcatcaatagtggtctgtcgtacaactgtagcttgcctctggcatttgatggtagttgctccggcctgcaacatttctcagcgatgttacgcgacgaaattggcggcaaagctgtgaatctcctcccatctgcggaataccaggatatttatcgtatcgtcagcgacaaagttaacgagatgctgaaacaagatctgattaacggtacctctaccaccgtggaaacggtgactgataagaagacaggcgaaattacccaacgcacgaaatacgggaccaaagttatggcacagtggtggttagaacacggtgtgaatcgtggcgtcacgaaacgctcggttatgactttggtgtatgggagcaaagagtttggattccgcgatcaagtgctgagtgacaccattcaaccggcgatcgataacggcaaaggtgacatgtttctgaatccgaatcaggctgctggttacatggcgaaactgatctggaacgcagtgtccgggaccgtagtcgcagcagttgaggcgatgaactggctgaaaagtgcggcgaaattacttgctgctgaagtgaaggatcctaagacggatacagttctgcgtggccgctgcgcagtacattgggtgactcccgacggcttccctgtgtggcaggaatacaagaagcctattcagacgcgcttgaacctgatgttcctcggtcagttccgcttacagcctaccattaacaccaacaaagatagcgagattgatgcacacaaacaggagtctggtatcgctcctaactttgtacacagccaagacggtaaccaccttcgtatgactgtagtgtgggcacacgagaagtacggaatcgaatcttttgcactgattcacgactccttcggtaccattccggctgacgctgcgaacctgttcaaagcagtgcgcgaaactttcgttgacacatatgagtcttacgatgtactggctgatttctacgaccagttcgctgaccagttgcacgagtctcaacgcgacaaaatgccagcacttccggctaaaggtaacttgaacctccgtgacatcttaaaatcggacttcgcgttcgcg

SEQ ID NO: 1440 - protein, 890 aa, synthetic construct
  REGION 1..890: note = Variant of RNA polymerase
MHHHHHHMNTINIAKNDFSDIELAAIPFNTLADHYGERLAREQLALEHESYEMGEARFRKMFERQLKAGEVADNAAAKPLITTLLPKMIARINDWFEEVKAKRGKRPTAFQFLQEIKPEAVAYITIKTTLACLTSADNTTVQAVASAIGRAIEDEARFGRIRDLEAKHFKKNVEEQLNKRVGHVYKKAFMQVVEHDMLSKGLLGGEAWSSWHKEDSIHVGVRCIEMLIESTGMVSLHRQNAGVVGQDSETIELAPEYAEAIATRAGALAGISPMFQPCVVPPKPWTGITGGGYWAAGRKPLQLVRTRSLAALRRYEEVSMPEVIKAVNIAQNTAWRINKKVLDVANTITQWQHCPVADVPAMDRGEMPARPLDIDTNEIALKAWKKEASAFYRKDKARVSRRLSMEFMLSQANKFANYEAIWFPQNMDWRGRVYAVPMFNPQGNDMTKGLLTFAQEKPIGEDGFYWLKIHGANTAGVDKVPFPQRIKFVEDNHTNIMECAKAPLENTWWAEQDSPFCFLAFCFEYAGVINSGLSYNCSLPLAFDGSCSGLQHFSAMLRDEIGGKAVNLLPSAEYQDIYRIVSDKVNEMLKQDLINGTSTTVETVTDKKTGEITQRTKYGTKVMAQWWLEHGVNRGVTKRSVMTLVYGSKEFGFRDQVLSDTIQPAIDNGKGDMFLNPNQAAGYMAKLIWNAVSGTVVAAVEAMNWLKSAAKLLAAEVKDPKTDTVLRGRCAVHWVTPDGFPVWQEYKKPIQTRLNLMFLGQFRLQPTINTNKDSEIDAHKQESGIAPNFVHSQDGNHLRMTVVWAHEKYGIESFALIHDSFGTIPADAANLFKAVRETFVDTYESYDVLADFYDQFADQLHESQRDKMPALPAKGNLNLRDILKSDFAFA

SEQ ID NO: 1441 - DNA, 2670 bp, synthetic construct
  misc_feature 1..2670: note = Variant of RNA polymerase
  source 1..2670: mol_type = other DNA
atgcaccatcaccatcaccatatgaacacgattaacattgctaagaacgacttctctgacatcgaactggctgctatcccgttcaacactctggctgaccattacggtgagcgtttagctcgcgaacagttggcccttgagcatgagtcttacgagatgggtgaagcacgcttccgcaagatgtttgagcgtcaacttaaagctggtgaggttgcggataacgctgccgccaagcctctcatcactaccctactccctaagatgattgcacgcatcaacgactggtttgaggaagtgaaagctaagcgcggcaagcgcccgacagccttccagttcctgcaagaaatcaagccggaagccgtagcgtacatcaccattaagaccactctggcttgcctaaccagtgcggacaatacaaccgttcaggctgtagcaagcgcaatcggtcgggccattgaggacgaggctcgcttcggtcgtatccgtgaccttgaagctaagcacttcaagaagaacgttgaggaacaactcaacaagcgcgtagggcacgtctacaagaaagcatttatgcaagttgtcgagcacgacatgctctctaagggtctactcggtggcgaggcgtggtcttcgtggcataaggaagactctattcatgtaggagtacgctgcatcgagatgctcattgagtcaaccggaatggttagcttacaccgccaaaatgctggcgtagtaggtcaagactctgagactatcgaactcgcacctgaatacgctgaggctatcgcaacccgtgcaggtgcgctggctggcatctctccgatgttccaaccttgcgtagttcctcctaagccgtggactggcattactggtggtggctattgggctgcggggcgcaaacccctgcagttagtacgtactcgcagtctggcggcgcttcgccgctatgaagaagtgtcgatgccggaggtcatcaaagcagtcaacattgcgcagaatacagcatggcgtattaacaagaaagttctcgacgtagcgaataccatcacccaatggcagcactgtccagtcgcggatgtgcctgcgatggatcgtggcgaaatgccagctcgtccgttggacatcgataccaacgagattgcacttaaagcgtggaagaaagaagcttccgcgttctaccgcaaagacaaagcacgcgttagccgtcgtctgtcaatggagtttatgttatctcaggcgaacaagtttgcgaattatgaggcaatctggtttccgcaaaacatggattggcgtgggcgcgtgtacgctgtcccgatgttcaatcctcagggcaacgatatgacgaaaggcctgctgacctttgcgcaggagaaacccattggtgaagacggcttctattggctcaagattcatggcgcaaatacagctggagtggataaagtaccgtttccacaacgcatcaaatttgttgaggataaccatacgaatattatggaatgcgcgaaagcaccgctggaaaacacttggtgggcggaacaggactcgccgttctgttttctggcgttctgctttgagtatgctggcgtcatcaatagtggtctgtcgtacaactgtagcttgcctctggcatttgatggtagttgctccggcctgcaacatttctcagcgatgttacgcgacgaaattggcggcaaagctgtgaatctcctcccatctgcggaataccaggatatttatcgtatcgtcagcgacaaagttaacgagatgctgaaacaagatctgattaacggtacctctaccaccgtggaaacggtgactgataagaagacaggcgaaattacccaacgcacgaaatacgggaccaaagttatggcacagtggtggttagaacacggtgtgaatcgtggcgtcacgaaacgctcggttatgactttggtgtatgggagcaaagagtttggattccgcgatcaagtgctgagtgacaccattcaaccggcgatcgataacggcaaaggtgacatgtttctgaatccgaatcaggctgctggttacatggcgaaactgatctggaacgcagtgtccgggaccgtagtcgcagcagttgaggcgatgaactggctgaaaagtgcggcgaaattacttgctgctgaagtgaaggatcctaagacggatacagttctgcgtggccgctgcgcagtacattgggtgactcccgacggcttccctgtgtggcaggaatacaagaagcctattcagacgcgcttgaacctgatgttcctcggtcagttccgcttacagcctaccattaacaccaacaaagatagcgagattgatgcacacaaacaggagtctggtatcgctcctaactttgtacacagccaagacggtaaccaccttcgtatgactgtagtgtgggcacacgagaagtacggaatcgaatcttttgcactgattcacgactccttcggtaccattccggctgacgctgcgaacctgttcaaagcagtgcgcgaaactttcgttgacacatatgagtctgtcgatgtactggctgatttctacgaccagttcgctgaccagttgcacgagtctcaacgcgacaaaatgccagcacttccggctaaaggtaacttgaacctccgtgacatcttaaaatcggacttcgcgttcgcg

SEQ ID NO: 1442 - protein, 890 aa, synthetic construct
  REGION 1..890: note = Variant of RNA polymerase
MHHHHHHMNTINIAKNDFSDIELAAIPFNTLADHYGERLAREQLALEHESYEMGEARFRKMFERQLKAGEVADNAAAKPLITTLLPKMIARINDWFEEVKAKRGKRPTAFQFLQEIKPEAVAYITIKTTLACLTSADNTTVQAVASAIGRAIEDEARFGRIRDLEAKHFKKNVEEQLNKRVGHVYKKAFMQVVEHDMLSKGLLGGEAWSSWHKEDSIHVGVRCIEMLIESTGMVSLHRQNAGVVGQDSETIELAPEYAEAIATRAGALAGISPMFQPCVVPPKPWTGITGGGYWAAGRKPLQLVRTRSLAALRRYEEVSMPEVIKAVNIAQNTAWRINKKVLDVANTITQWQHCPVADVPAMDRGEMPARPLDIDTNEIALKAWKKEASAFYRKDKARVSRRLSMEFMLSQANKFANYEAIWFPQNMDWRGRVYAVPMFNPQGNDMTKGLLTFAQEKPIGEDGFYWLKIHGANTAGVDKVPFPQRIKFVEDNHTNIMECAKAPLENTWWAEQDSPFCFLAFCFEYAGVINSGLSYNCSLPLAFDGSCSGLQHFSAMLRDEIGGKAVNLLPSAEYQDIYRIVSDKVNEMLKQDLINGTSTTVETVTDKKTGEITQRTKYGTKVMAQWWLEHGVNRGVTKRSVMTLVYGSKEFGFRDQVLSDTIQPAIDNGKGDMFLNPNQAAGYMAKLIWNAVSGTVVAAVEAMNWLKSAAKLLAAEVKDPKTDTVLRGRCAVHWVTPDGFPVWQEYKKPIQTRLNLMFLGQFRLQPTINTNKDSEIDAHKQESGIAPNFVHSQDGNHLRMTVVWAHEKYGIESFALIHDSFGTIPADAANLFKAVRETFVDTYESVDVLADFYDQFADQLHESQRDKMPALPAKGNLNLRDILKSDFAFA

SEQ ID NO: 1443 - DNA, 2670 bp, synthetic construct
  misc_feature 1..2670: note = Variant of RNA polymerase
  source 1..2670: mol_type = other DNA
atgcaccatcaccatcaccatatgaacacgattaacattgctaagaacgacttctctgacatcgaactggctgctatcccgttcaacactctggctgaccattacggtgagcgtttagctcgcgaacagttggcccttgagcatgagtcttacgagatgggtgaagcacgcttccgcaagatgtttgagcgtcaacttaaagctggtgaggttgcggataacgctgccgccaagcctctcatcactaccctactccctaagatgattgcacgcatcaacgactggtttgaggaagtgaaagctaagcgcggcaagcgcccgacagccttccagttcctgcaagaaatcaagccggaagccgtagcgtacatcaccattaagaccactctggcttgcctaaccagtgcggacaatacaaccgttcaggctgtagcaagcgcaatcggtcgggccattgaggacgaggctcgcttcggtcgtatccgtgaccttgaagctaagcacttcaagaagaacgttgaggaacaactcaacaagcgcgtagggcacgtctacaagaaagcatttatgcaagttgtcgagcacgacatgctctctaagggtctactcggtggcgaggcgtggtcttcgtggcataaggaagactctattcatgtaggagtacgctgcatcgagatgctcattgagtcaaccggaatggttagcttacaccgccaaaatgctggcgtagtaggtcaagactctgagactatcgaactcgcacctgaatacgctgaggctatcgcaacccgtgcaggtgcgctggctggcatctctccgatgttccaaccttgcgtagttcctcctaagccgtggactggcattactggtggtggctattgggctgcggggcgcaaacccctgcagttagtacgtactcgcagtctggcggcgcttcgccgctatgaagaagtgtcgatgccggaggtcatcaaagcagtcaacattgcgcagaatacagcatggcgtattaacaagaaagttctcgacgtagcgaataccatcacccaatggcagcactgtccagtcgcggatgtgcctgcgatggatcgtggcgaaatgccagctcgtccgttggacatcgataccaacgagattgcacttaaagcgtggaagaaagaagcttccgcgttctaccgcaaagacaaagcacgcgttagccgtcgtctgtcaatggagtttatgttatctcaggcgaacaagtttgcgaattatgaggcaatctggtttccgcaaaacatggattggcgtgggcgcgtgtacgctgtcccgatgttcaatcctcagggcaacgatatgacgaaaggcctgctgacctttgcgcaggagaaacccattggtgaagacggcttctattggctcaagattcatggcgcaaatacagctggagtggataaagtaccgtttccacaacgcatcaaatttgttgaggataaccatacgaatattatggaatgcgcgaaagcaccgctggaaaacacttggtgggcggaacaggactcgccgttctgttttctggcgttctgctttgagtatgctggcgtcatcaatagtggtctgtcgtacaactgtagcttgcctctggcatttgatggtagttgctccggcctgcaacatttctcagcgatgttacgcgacgaagtcggcggcaaagctgtgaatctcctcccatctgcggaataccaggatatttatcgtatcgtcagcgacaaagttaacgagatgctgaaacaagatctgattaacggtacctctaccaccgtggaaacggtgactgataagaagacaggcgaaattacccaacgcacgaaatacgggaccaaagttatggcacagtggtggttagaacacggtgtgaatcgtggcgtcacgaaacgctcggttatgactttggtgtatgggagcaaagagtttggattccgcgatcaagtgctgagtgacaccattcaaccggcgatcgataacggcaaaggtgacatgtttctgaatccgaatcaggctgctggttacatggcgaaactgatctggaacgcagtgtccgggaccgtagtcgcagcagttgaggcgatgaactggctgaaaagtgcggcgaaattacttgctgctgaagtgaaggatcctaagacggatacagttctgcgtggccgctgcgcagtacattgggtgactcccgacggcttccctgtgtggcaggaatacaagaagcctattcagacgcgcttgaacctgatgttcctcggtcagttccgcttacagcctaccattaacaccaacaaagatagcgagattgatgcacacaaacaggagtctggtatcgctcctaactttgtacacagccaagacggtaaccaccttcgtatgactgtagtgtgggcacacgagaagtacggaatcgaatcttttgcactgattcacgactccttcggtaccattccggctgacgctgcgaacctgttcaaagcagtgcgcgaaactttcgttgacacatatgagtcttgtgatgtactggctgatttctacgaccagttcgctgaccagttgcacgagtctcaacgcgacaaaatgccagcacttccggctaaaggtaacttgaacctccgtgacatcttaaaatcggacttcgcgttcgcg

SEQ ID NO: 1444 - protein, 890 aa, synthetic construct
  REGION 1..890: note = Variant of RNA polymerase
MHHHHHHMNTINIAKNDFSDIELAAIPFNTLADHYGERLAREQLALEHESYEMGEARFRKMFERQLKAGEVADNAAAKPLITTLLPKMIARINDWFEEVKAKRGKRPTAFQFLQEIKPEAVAYITIKTTLACLTSADNTTVQAVASAIGRAIEDEARFGRIRDLEAKHFKKNVEEQLNKRVGHVYKKAFMQVVEHDMLSKGLLGGEAWSSWHKEDSIHVGVRCIEMLIESTGMVSLHRQNAGVVGQDSETIELAPEYAEAIATRAGALAGISPMFQPCVVPPKPWTGITGGGYWAAGRKPLQLVRTRSLAALRRYEEVSMPEVIKAVNIAQNTAWRINKKVLDVANTITQWQHCPVADVPAMDRGEMPARPLDIDTNEIALKAWKKEASAFYRKDKARVSRRLSMEFMLSQANKFANYEAIWFPQNMDWRGRVYAVPMFNPQGNDMTKGLLTFAQEKPIGEDGFYWLKIHGANTAGVDKVPFPQRIKFVEDNHTNIMECAKAPLENTWWAEQDSPFCFLAFCFEYAGVINSGLSYNCSLPLAFDGSCSGLQHFSAMLRDEVGGKAVNLLPSAEYQDIYRIVSDKVNEMLKQDLINGTSTTVETVTDKKTGEITQRTKYGTKVMAQWWLEHGVNRGVTKRSVMTLVYGSKEFGFRDQVLSDTIQPAIDNGKGDMFLNPNQAAGYMAKLIWNAVSGTVVAAVEAMNWLKSAAKLLAAEVKDPKTDTVLRGRCAVHWVTPDGFPVWQEYKKPIQTRLNLMFLGQFRLQPTINTNKDSEIDAHKQESGIAPNFVHSQDGNHLRMTVVWAHEKYGIESFALIHDSFGTIPADAANLFKAVRETFVDTYESCDVLADFYDQFADQLHESQRDKMPALPAKGNLNLRDILKSDFAFA

SEQ ID NO: 1445 - DNA, 2670 bp, synthetic construct
  misc_feature 1..2670: note = Variant of RNA polymerase
  source 1..2670: mol_type = other DNA
atgcaccatcaccatcaccatatgaacacgattaacattgctaagaacgacttctctgacatcgaactggctgctatcccgttcaacactctggctgaccattacggtgagcgtttagctcgcgaacagttggcccttgagcatgagtcttacgagatgggtgaagcacgcttccgcaagatgtttgagcgtcaacttaaagctggtgaggttgcggataacgctgccgccaagcctctcatcactaccctactccctaagatgattgcacgcatcaacgactggtttgaggaagtgaaagctaagcgcggcaagcgcccgacagccttccagttcctgcaagaaatcaagccggaagccgtagcgtacatcaccattaagaccactctggcttgcctaaccagtgcggacaatacaaccgttcaggctgtagcaagcgcaatcggtcgggccattgaggacgaggctcgcttcggtcgtatccgtgaccttgaagctaagcacttcaagaagaacgttgaggaacaactcaacaagcgcgtagggcacgtctacaagaaagcatttatgcaagttgtcgagcacgacatgctctctaagggtctactcggtggcgaggcgtggtcttcgtggcataaggaagactctattcatgtaggagtacgctgcatcgagatgctcattgagtcaaccggaatggttagcttacaccgccaaaatgctggcgtagtaggtcaagactctgagactatcgaactcgcacctgaatacgctgaggctatcgcaacccgtgcaggtgcgctggctggcatctctccgatgttccaaccttgcgtagttcctcctaagccgtggactggcattactggtggtggctattgggctgcggggcgcaaacccctgcagttagtacgtactcgcagtctggcggcgcttcgccgctatgaagaagtgtcgatgccggaggtcatcaaagcagtcaacattgcgcagaatacagcatggcgtattaacaagaaagttctcgacgtagcgaataccatcacccaatggcagcactgtccagtcgcggatgtgcctgcgatggatcgtggcgaaatgccagctcgtccggaggacatcgataccaacgagattgcacttaaagcgtggaagaaagaagcttccgcgttctaccgcaaagacaaagcacgcgttagccgtcgtctgtcaatggagtttatgttatctcaggcgaacaagtttgcgaattatgaggcaatctggtttccgcaaaacatggattggcgtgggcgcgtgtacgctgtcccgatgttcaatcctcagggcaacgatatgacgaaaggcctgctgacctttgcgcaggagaaacccattggtgaagacggcttctattggctcaagattcatggcgcaaatacagctggagtggataaagtaccgtttccacaacgcatcaaatttgttgaggataaccatacgaatattatggaatgcgcgaaagcaccgctggaaaacacttggtgggcggaacaggactcgccgttctgttttctggcgttctgctttgagtatgctggcgtcatcaatagtggtctgtcgtacaactgtagcttgcctctggcatttgatggtagttgctccggcctgcaacatttctcagcgatgttacgcgacgaaattggcggcaaagctgtgaatctcctcccatctgcggaataccaggatatttatcgtatcgtcagcgacaaagttaacgagatgctgaaacaagatctgattaacggtacctctaccaccgtggaaacggtgactgataagaagacaggcgaaattacccaacgcacgaaatacgggaccaaagttatggcacagtggtggttagaacacggtgtgaatcgtggcgtcacgaaacgctcggttatgactttggtgtatgggagcaaagagtttggattccgcgatcaagtgctgagtgacaccattcaaccggcgatcgataacggcaaaggtgacatgtttctgaatccgaatcaggctgctggttacatggcgaaactgatctggaacgcagtgtccgggaccgtagtcgcagcagttgaggcgatgaactggctgaaaagtgcggcgaaattacttgctgctgaagtgaaggatcctaagacggatacagttctgcgtggccgctgcgcagtacattgggtgactcccgacggcttccctgtgtggcaggaatacaagaagcctattcagacgcgcttgaacctgatgttcctcggtcagttccgcttacagcctaccattaacaccaacaaagatagcgagattgatgcacacaaacaggagtctggtatcgctcctaactttgtacacagccaagacggtaaccaccttcgtatgactgtagtgtgggcacacgagaagtacggaatcgaatcttttgcactgattcacgactccttcggtaccattccggctgacgctgcgaacctgttcaaagcagtgcgcgaaactttcgttgacacatatgagtcttgtgatgtactggctgatttctacgaccagttcgctgaccagttgcacgagtctcaacgcgacaaaatgccagcacttccggctaaaggtaacttgaacctccgtgacatcttaaaatcggacttcgcgttcgcg

SEQ ID NO: 1446 - protein, 890 aa, synthetic construct
  REGION 1..890: note = Variant of RNA polymerase
MHHHHHHMNTINIAKNDFSDIELAAIPFNTLADHYGERLAREQLALEHESYEMGEARFRKMFERQLKAGEVADNAAAKPLITTLLPKMIARINDWFEEVKAKRGKRPTAFQFLQEIKPEAVAYITIKTTLACLTSADNTTVQAVASAIGRAIEDEARFGRIRDLEAKHFKKNVEEQLNKRVGHVYKKAFMQVVEHDMLSKGLLGGEAWSSWHKEDSIHVGVRCIEMLIESTGMVSLHRQNAGVVGQDSETIELAPEYAEAIATRAGALAGISPMFQPCVVPPKPWTGITGGGYWAAGRKPLQLVRTRSLAALRRYEEVSMPEVIKAVNIAQNTAWRINKKVLDVANTITQWQHCPVADVPAMDRGEMPARPEDIDTNEIALKAWKKEASAFYRKDKARVSRRLSMEFMLSQANKFANYEAIWFPQNMDWRGRVYAVPMFNPQGNDMTKGLLTFAQEKPIGEDGFYWLKIHGANTAGVDKVPFPQRIKFVEDNHTNIMECAKAPLENTWWAEQDSPFCFLAFCFEYAGVINSGLSYNCSLPLAFDGSCSGLQHFSAMLRDEIGGKAVNLLPSAEYQDIYRIVSDKVNEMLKQDLINGTSTTVETVTDKKTGEITQRTKYGTKVMAQWWLEHGVNRGVTKRSVMTLVYGSKEFGFRDQVLSDTIQPAIDNGKGDMFLNPNQAAGYMAKLIWNAVSGTVVAAVEAMNWLKSAAKLLAAEVKDPKTDTVLRGRCAVHWVTPDGFPVWQEYKKPIQTRLNLMFLGQFRLQPTINTNKDSEIDAHKQESGIAPNFVHSQDGNHLRMTVVWAHEKYGIESFALIHDSFGTIPADAANLFKAVRETFVDTYESCDVLADFYDQFADQLHESQRDKMPALPAKGNLNLRDILKSDFAFA

SEQ ID NO: 1447 - DNA, 2670 bp, synthetic construct
  misc_feature 1..2670: note = Variant of RNA polymerase
  source 1..2670: mol_type = other DNA
atgcaccatcaccatcaccatatgaacacgattaacattgctaagaacgacttctctgacatcgaactggctgctatcccgttcaacactctggctgaccattacggtgagcgtttagctcgcgaacagttggcccttgagcatgagtcttacgagatgggtgaagcacgcttccgcaagatgtttgagcgtcaacttaaagctggtgaggttgcggataacgctgccgccaagcctctcatcactaccctactccctaagatgattgcacgcatcaacgactggtttgaggaagtgaaagctaagcgcggcaagcgcccgacagccttccagttcctgcaagaaatcaagccggaagccgtagcgtacatcaccattaagaccactctggcttgcctaaccagtgcggacaatacaaccgttcaggctgtagcaagcgcaatcggtcgggccattgaggacgaggctcgcttcggtcgtatccgtgaccttgaagctaagcacttcaagaagaacgttgaggaacaactcaacaagcgcgtagggcacgtctacaagaaagcatttatgcaagttgtcgagcacgacatgctctctaagggtctactcggtggcgaggcgtggtcttcgtggcataaggaagactctattcatgtaggagtacgctgcatcgagatgctcattgagtcaaccggaatggttagcttacaccgccaaaatgctggcgtagtaggtcaagactctgagactatcgaactcgcacctgaatacgctgaggctatcgcaacccgtgcaggtgcgctggctggcatctctccgatgttccaaccttgcgtagttcctcctaagccgtggactggcattactggtggtggctattgggctgcggggcgcaaacccctgcagttagtacgtactcgcagtctggcggcgcttcgccgctatgaagaagtgtcgatgccggaggtcatcaaagcagtcaacattgcgcagaatacagcatggcgtattaacaagaaagttctcgacgtagcgaataccatcacccaatggcagcactgtccagtcgcggatgtgcctgcgatggatcgtggcgaaatgccagctcgtccgttggacatcgataccaacgagattgcacttaaagcgtggaagaaagaagcttccgcgttctaccgcaaagacaaagcacgcgttagccgtcgtctgtcaatggagtttatgttatctcaggcgaacaagtttgcgaattatgaggcaatctggtttccgcaaaacatggattggcgtgggcgcgtgtacgctgtcccgatgttcaatcctcagggcaacgatatgacgaaaggcctgctgacctttgcgcaggagaaacccattggtgaagacggcttctattggctcaagattcatggcgcaaatacagctggagtggataaagtaccgtttccacaacgcatcaaatttgttgaggataaccatacgaatattatggaatgcgcgaaagcaccgctggaaaacacttggtgggcggaacaggactcgccgttctgttttctggcgttctgctttgagtatgctggcgtcatcaatagtggtctgtcgtacaactgtagcttgcctctggcatttgatggtagttgctccggcctgcaacatttctcagcgatgttacgcgacgaaattggcggcaaagctgtgaatctcctcccatctgcggaataccaggatatttatcgtatcgtcagcgacaaagttaacgagatgctgaaacaagatctgattaacggtacctctaccaccgtggaaacggtgactgataagaagacaggcgaaattacccaacgcacgaaatacgggaccaaagttatggcacagtggtggttagaacacggtgtgaatcgtggcgtcacgaaacgctcggttatgactttggtgtatgggagcaaagagtttggattccgcgatcaagtgctgagtgacaccattcaaccggcgatcgataacggcaaaggtgacatgtttctgaatccgaatcaggctgctggttacatggcgaaactgatctgggaggcagtgtccgggaccgtagtcgcagcagttgaggcgatgaactggctgaaaagtgcggcgaaattacttgctgctgaagtgaaggatcctaagacggatacagttctgcgtggccgctgcgcagtacattgggtgactcccgacggcttccctgtgtggcaggaatacaagaagcctattcagacgcgcttgaacctgatgttcctcggtcagttccgcttacagcctaccattaacaccaacaaagatagcgagattgatgcacacaaacaggagtctggtatcgctcctaactttgtacacagccaagacggtaaccaccttcgtatgactgtagtgtgggcacacgagaagtacggaatcgaatcttttgcactgattcacgactccttcggtaccattccggctgacgctgcgaacctgttcaaagcagtgcgcgaaactttcgttgacacatatgagtcttgtgatgtactggctgatttctacgaccagttcgctgaccagttgcacgagtctcaacgcgacaaaatgccagcacttccggctaaaggtaacttgaacctccgtgacatcttaaaatcggacttcgcgttcgcg

SEQ ID NO: 1448 - protein, 890 aa, synthetic construct
  REGION 1..890: note = Variant of RNA polymerase
MHHHHHHMNTINIAKNDFSDIELAAIPFNTLADHYGERLAREQLALEHESYEMGEARFRKMFERQLKAGEVADNAAAKPLITTLLPKMIARINDWFEEVKAKRGKRPTAFQFLQEIKPEAVAYITIKTTLACLTSADNTTVQAVASAIGRAIEDEARFGRIRDLEAKHFKKNVEEQLNKRVGHVYKKAFMQVVEHDMLSKGLLGGEAWSSWHKEDSIHVGVRCIEMLIESTGMVSLHRQNAGVVGQDSETIELAPEYAEAIATRAGALAGISPMFQPCVVPPKPWTGITGGGYWAAGRKPLQLVRTRSLAALRRYEEVSMPEVIKAVNIAQNTAWRINKKVLDVANTITQWQHCPVADVPAMDRGEMPARPLDIDTNEIALKAWKKEASAFYRKDKARVSRRLSMEFMLSQANKFANYEAIWFPQNMDWRGRVYAVPMFNPQGNDMTKGLLTFAQEKPIGEDGFYWLKIHGANTAGVDKVPFPQRIKFVEDNHTNIMECAKAPLENTWWAEQDSPFCFLAFCFEYAGVINSGLSYNCSLPLAFDGSCSGLQHFSAMLRDEIGGKAVNLLPSAEYQDIYRIVSDKVNEMLKQDLINGTSTTVETVTDKKTGEITQRTKYGTKVMAQWWLEHGVNRGVTKRSVMTLVYGSKEFGFRDQVLSDTIQPAIDNGKGDMFLNPNQAAGYMAKLIWEAVSGTVVAAVEAMNWLKSAAKLLAAEVKDPKTDTVLRGRCAVHWVTPDGFPVWQEYKKPIQTRLNLMFLGQFRLQPTINTNKDSEIDAHKQESGIAPNFVHSQDGNHLRMTVVWAHEKYGIESFALIHDSFGTIPADAANLFKAVRETFVDTYESCDVLADFYDQFADQLHESQRDKMPALPAKGNLNLRDILKSDFAFA

SEQ ID NO: 1449 - DNA, 2670 bp, synthetic construct
  misc_feature 1..2670: note = Variant of RNA polymerase
  source 1..2670: mol_type = other DNA
atgcaccatcaccatcaccatatgaacacgattaacattgctaagaacgacttctctgacatcgaactggctgctatcccgttcaacactctggctgaccattacggtgagcgtttagctcgcgaacagttggcccttgagcatgagtcttacgagatgggtgaagcacgcttccgcaagatgtttgagcgtcaacttaaagctggtgaggttgcggataacgctgccgccaagcctctcatcactaccctactccctaagatgattgcacgcatcaacgactggtttgaggaagtgaaagctaagcgcggcaagcgcccgacagccttccagttcctgcaagaaatcaagccggaagccgtagcgtacatcaccattaagaccactctggcttgcctaaccagtgcggacaatacaaccgttcaggctgtagcaagcgcaatcggtcgggccattgaggacgaggctcgcttcggtcgtatccgtgaccttgaagctaagcacttcaagaagaacgttgaggaacaactcaacaagcgcgtagggcacgtctacaagaaagcatttatgcaagttgtcgagcacgacatgctctctaagggtctactcggtggcgaggcgtggtcttcgtggcataaggaagactctattcatgtaggagtacgctgcatcgagatgctcattgagtcaaccggaatggttagcttacaccgccaaaatgctggcgtagtaggtcaagactctgagactatcgaactcgcacctgaatacgctgaggctatcgcaacccgtgcaggtgcgctggctggcatctctccgatgttccaaccttgcgtagttcctcctaagccgtggactggcattactggtggtggctattgggctgcggggcgcaaacccctgcagttagtacgtactcgcagtctggcggcgcttcgccgctatgaagaagtgtcgatgccggaggtcatcaaagcagtcaacattgcgcagaatacagcatggcgtattaacaagaaagttctcgacgtagcgaataccatcacccaatggcagcactgtccagtcgcggatgtgcctgcgatggatcgtggcgaaatgccagctcgtccgttggacatcgataccaacgagattgcacttaaagcgtggaagaaagaagcttccgcgttctaccgcaaagacaaagcacgcgttagccgtcgtctgtcaatggagtttatgttatctcaggcgaacaagtttgcgaattatgaggcaatctggtttccgcaaaacatggattggcgtgggcgcgtgtacgctgtcccgatgttcaatcctcagggcaacgatatgacgaaaggcctgctgacctttgcgcaggagaaacccattggtgaagacggcttctattggctcaagattcatggcgcaaatacagctggagtggataaagtaccgtttccacaacgcatcaaatttgttgaggataaccatacgaatattatggaatgcgcgaaagcaccgctggaaaacacttggtgggcggaacaggactcgccgttctgttttctggcgttctgctttgagtatgctggcgtcatcaatagtggtctgtcgtacaactgtagcttgcctctggcatttgatggtagttgctccggcctgcaacatttctcagcgatgttacgcgacgaaattggcggcaaagctgtgaatctcctcccatctgcggaataccaggatatttatcgtatcgtcagcgacaaagttaacgagatgctgaaacaagatctgattaacggtacctctaccaccgtggaaacggtgactgataagaagacaggcgaaattacccaacgcacgaaatacgggaccaaagttatggcacagtggtggttagaacacggtgtgaatcgtggcgtcacgaaacgctcggttatgactttggtgtatgggagcaaagagtttggattccgcgatcaagtgctgagtgacaccattcaaccggcgatcgataacggcaaaggtgacatgtttctgaatccgaatcaggctgctggttacatggcgaaactgatctggaacgcagtgtccgggaccgtagtcgcagcagttgaggcgatgaactggctgaaaagtgcggcgaaattacttgctgctgaagtgaaggatcctaagacggatacagttctgcgtggccgcctggcagtacattgggtgactcccgacggcttccctgtgtggcaggaatacaagaagcctattcagacgcgcttgaacctgatgttcctcggtcagttccgcttacagcctaccattaacaccaacaaagatagcgagattgatgcacacaaacaggagtctggtatcgctcctaactttgtacacagccaagacggtaaccaccttcgtatgactgtagtgtgggcacacgagaagtacggaatcgaatcttttgcactgattcacgactccttcggtaccattccggctgacgctgcgaacctgttcaaagcagtgcgcgaaactttcgttgacacatatgagtcttgtgatgtactggctgatttctacgaccagttcgctgaccagttgcacgagtctcaacgcgacaaaatgccagcacttccggctaaaggtaacttgaacctccgtgacatcttaaaatcggacttcgcgttcgcg

SEQ ID NO: 1450 - protein, 890 aa, synthetic construct
  REGION 1..890: note = Variant of RNA polymerase
MHHHHHHMNTINIAKNDFSDIELAAIPFNTLADHYGERLAREQLALEHESYEMGEARFRKMFERQLKAGEVADNAAAKPLITTLLPKMIARINDWFEEVKAKRGKRPTAFQFLQEIKPEAVAYITIKTTLACLTSADNTTVQAVASAIGRAIEDEARFGRIRDLEAKHFKKNVEEQLNKRVGHVYKKAFMQVVEHDMLSKGLLGGEAWSSWHKEDSIHVGVRCIEMLIESTGMVSLHRQNAGVVGQDSETIELAPEYAEAIATRAGALAGISPMFQPCVVPPKPWTGITGGGYWAAGRKPLQLVRTRSLAALRRYEEVSMPEVIKAVNIAQNTAWRINKKVLDVANTITQWQHCPVADVPAMDRGEMPARPLDIDTNEIALKAWKKEASAFYRKDKARVSRRLSMEFMLSQANKFANYEAIWFPQNMDWRGRVYAVPMFNPQGNDMTKGLLTFAQEKPIGEDGFYWLKIHGANTAGVDKVPFPQRIKFVEDNHTNIMECAKAPLENTWWAEQDSPFCFLAFCFEYAGVINSGLSYNCSLPLAFDGSCSGLQHFSAMLRDEIGGKAVNLLPSAEYQDIYRIVSDKVNEMLKQDLINGTSTTVETVTDKKTGEITQRTKYGTKVMAQWWLEHGVNRGVTKRSVMTLVYGSKEFGFRDQVLSDTIQPAIDNGKGDMFLNPNQAAGYMAKLIWNAVSGTVVAAVEAMNWLKSAAKLLAAEVKDPKTDTVLRGRLAVHWVTPDGFPVWQEYKKPIQTRLNLMFLGQFRLQPTINTNKDSEIDAHKQESGIAPNFVHSQDGNHLRMTVVWAHEKYGIESFALIHDSFGTIPADAANLFKAVRETFVDTYESCDVLADFYDQFADQLHESQRDKMPALPAKGNLNLRDILKSDFAFA

SEQ ID NO: 1451 - DNA, 2670 bp, synthetic construct
  misc_feature 1..2670: note = Variant of RNA polymerase
  source 1..2670: mol_type = other DNA
atgcaccatcaccatcaccatatgaacacgattaacattgctaagaacgacttctctgacatcgaactggctgctatcccgttcaacactctggctgaccattacggtgagcgtttagctcgcgaacagttggcccttgagcatgagtcttacgagatgggtgaagcacgcttccgcaagatgtttgagcgtcaacttaaagctggtgaggttgcggataacgctgccgccaagcctctcatcactaccctactccctaagatgattgcacgcatcaacgactggtttgaggaagtgaaagctaagcgcggcaagcgcccgacagccttccagttcctgcaagaaatcaagccggaagccgtagcgtacatcaccattaagaccactctggcttgcctaaccagtgcggacaatacaaccgttcaggctgtagcaagcgcaatcggtcgggccattgaggacgaggctcgcttcggtcgtatccgtgaccttgaagctaagcacttcaagaagaacgttgaggaacaactcaacaagcgcgtagggcacgtctacaagaaagcatttatgcaagttgtcgagcacgacatgctctctaagggtctactcggtggcgaggcgtggtcttcgtggcataaggaagactctattcatgtaggagtacgctgcatcgagatgctcattgagtcaaccggaatggttagcttacaccgccaaaatgctggcgtagtaggtcaagactctgagactatcgaactcgcacctgaatacgctgaggctatcgcaacccgtgcaggtgcgctggctggcatctctccgatgttccaaccttgcgtagttcctcctaagccgtggactggcattactggtggtggctattgggctgcggggcgcaaacccctgcagttagtacgtactcgcagtctggcggcgcttcgccgctatgaagaagtgtcgatgccggaggtcatcaaagcagtcaacattgcgcagaatacagcatggcgtattaacaagaaagttctcgacgtagcgaataccatcacccaatggcagcactgtccagtcgcggatgtgcctgcgatggatcgtggcgaaatgccagctcgtccgttggacatcgataccaacgagattgcacttaaagcgtggaagaaagaagcttccgcgttctaccgcaaagacaaagcacgcgttagccgtcgtctgtcaatggagtttatgttatctcaggcgaacaagtttgcgaattatgaggcaatctggtttccgcaaaacatggattggcgtgggcgcgtgtacgctgtcccgatgttcaatcctcagggcaacgatatgacgaaaggcctgctgacctttgcgaaggagaaacccattggtgaagacggcttctattggctcaagattcatggcgcaaatacagctggagtggataaagtaccgtttccacaacgcatcaaatttgttgaggataaccatacgaatattatggaatgcgcgaaagcaccgctggaaaacacttggtgggcggaacaggactcgccgttctgttttctggcgttctgctttgagtatgctggcgtcatcaatagtggtctgtcgtacaactgtagcttgcctctggcatttgatggtagttgctccggcctgcaacatttctcagcgatgttacgcgacgaaattggcggcaaagctgtgaatctcctcccatctgcggaataccaggatatttatcgtatcgtcagcgacaaagttaacgagatgctgaaacaagatctgattaacggtacctctaccaccgtggaaacggtgactgataagaagacaggcgaaattacccaacgcacgaaatacgggaccaaagttatggcacagtggtggttagaacacggtgtgaatcgtggcgtcacgaaacgctcggttatgactttggtgtatgggagcaaagagtttggattccgcgatcaagtgctgagtgacaccattcaaccggcgatcgataacggcaaaggtgacatgtttctgaatccgaatcaggctgctggttacatggcgaaactgatctggaacgcagtgtccgggaccgtagtcgcagcagttgaggcgatgaactggctgaaaagtgcggcgaaattacttgctgctgaagtgaaggatcctaagacggatacagttctgcgtggccgctgcgcagtacattgggtgactcccgacggcttccctgtgtggcaggaatacaagaagcctattcagacgcgcttgaacctgatgttcctcggtcagttccgcttacagcctaccattaacaccaacaaagatagcgagattgatgcacacaaacaggagtctggtatcgctcctaactttgtacacagccaagacggtaaccaccttcgtatgactgtagtgtgggcacacgagaagtacggaatcgaatcttttgcactgattcacgactccttcggtaccattccggctgacgctgcgaacctgttcaaagcagtgcgcgaaactttcgttgacacatatgagtcttgtgatgtactggctgatttctacgaccagttcgctgaccagttgcacgagtctcaacgcgacaaaatgccagcacttccggctaaaggtaacttgaacctccgtgacatcttaaaatcggacttcgcgttcgcg

SEQ ID NO: 1452 - protein, 890 aa, synthetic construct
  REGION 1..890: note = Variant of RNA polymerase
MHHHHHHMNTINIAKNDFSDIELAAIPFNTLADHYGERLAREQLALEHESYEMGEARFRKMFERQLKAGEVADNAAAKPLITTLLPKMIARINDWFEEVKAKRGKRPTAFQFLQEIKPEAVAYITIKTTLACLTSADNTTVQAVASAIGRAIEDEARFGRIRDLEAKHFKKNVEEQLNKRVGHVYKKAFMQVVEHDMLSKGLLGGEAWSSWHKEDSIHVGVRCIEMLIESTGMVSLHRQNAGVVGQDSETIELAPEYAEAIATRAGALAGISPMFQPCVVPPKPWTGITGGGYWAAGRKPLQLVRTRSLAALRRYEEVSMPEVIKAVNIAQNTAWRINKKVLDVANTITQWQHCPVADVPAMDRGEMPARPLDIDTNEIALKAWKKEASAFYRKDKARVSRRLSMEFMLSQANKFANYEAIWFPQNMDWRGRVYAVPMFNPQGNDMTKGLLTFAKEKPIGEDGFYWLKIHGANTAGVDKVPFPQRIKFVEDNHTNIMECAKAPLENTWWAEQDSPFCFLAFCFEYAGVINSGLSYNCSLPLAFDGSCSGLQHFSAMLRDEIGGKAVNLLPSAEYQDIYRIVSDKVNEMLKQDLINGTSTTVETVTDKKTGEITQRTKYGTKVMAQWWLEHGVNRGVTKRSVMTLVYGSKEFGFRDQVLSDTIQPAIDNGKGDMFLNPNQAAGYMAKLIWNAVSGTVVAAVEAMNWLKSAAKLLAAEVKDPKTDTVLRGRCAVHWVTPDGFPVWQEYKKPIQTRLNLMFLGQFRLQPTINTNKDSEIDAHKQESGIAPNFVHSQDGNHLRMTVVWAHEKYGIESFALIHDSFGTIPADAANLFKAVRETFVDTYESCDVLADFYDQFADQLHESQRDKMPALPAKGNLNLRDILKSDFAFA

SEQ ID NO: 1453 - DNA, 2670 bp, synthetic construct
  misc_feature 1..2670: note = Variant of RNA polymerase
  source 1..2670: mol_type = other DNA
atgcaccatcaccatcaccatatgaacacgattaacattgctaagaacgacttctctgacatcgaactggctgctatcccgttcaacactctggctgaccattacggtgagcgtttagctcgcgaacagttggcccttgagcatgagtcttacgagatgggtgaagcacgcttccgcaagatgtttgagcgtcaacttaaagctggtgaggttgcggataacgctgccgccaagcctctcatcactaccctactccctaagatgattgcacgcatcaacgactggtttgaggaagtgaaagctaagcgcggcaagcgcccgacagccttccagttcctgcaagaaatcaagccggaagccgtagcgtacatcaccattaagaccactctggcttgcctaaccagtgcggacaatacaaccgttcaggctgtagcaagcgcaatcggtcgggccattgaggacgaggctcgcttcggtcgtatccgtgaccttgaagctaagcacttcaagaagaacgttgaggaacaactcaacaagcgcgtagggcacgtctacaagaaagcatttatgcaagttgtcgagcacgacatgctctctaagggtctactcggtggcgaggcgtggtcttcgtggcataaggaagactctattcatgtaggagtacgctgcatcgagatgctcattgagtcaaccggaatggttagcttacaccgccaaaatgctggcgtagtaggtcaagactctgagactatcgaactcgcacctgaatacgctgaggctatcgcaacccgtgcaggtgcgctggctggcatctctccgatgttccaaccttgcgtagttcctcctaagccgtggactggcattactggtggtggctattgggctgcggggcgcaaacccctgcagttagtacgtactcgcagtctggcggcgcttcgccgctatgaagaagtgtcgatgccggaggtcatcaaagcagtcaacattgcgcagaatacagcatggcgtattaacaagaaagttctcgacgtagcgaataccatcacccaatggcagcactgtccagtcgcggatgtgcctgcgatggatcgtggcgaaatgccagctcgtccgttggacatcgataccaacgagattgcacttaaagcgtggaagaaagaagcttccgcgttctaccgcaaagacaaagcacgcgttagccgtcgtctgtcaatggagtttatgttatctcaggcgaacaagtttgcgaattatgaggcaatctggtttccgcaaaacatggattggcgtgggcgcgtgtacgctgtcccgatgttcaatcctcagggcaacgatatgacgaaaggcctgctgacctttgcgcaggagaaacccattggtgaagacggcttctattggctcaagattcatggcgcaaatacagctggagtggataaagtaccgtttccacaacgcatcaaatttgttgaggataaccatacgaatattatggaatgcgcgaaagcaccgctggaaaacacttggtgggcggaacaggactcgccgttctgttttctggcgttctgctttgagtatgctggcgtcatcaatagtggtctgtcgtacaacgtaagcttgcctctggcatttgatggtagttgctccggcctgcaacatttctcagcgatgttacgcgacgaaattggcggcaaagctgtgaatctcctcccatctgcggaataccaggatatttatcgtatcgtcagcgacaaagttaacgagatgctgaaacaagatctgattaacggtacctctaccaccgtggaaacggtgactgataagaagacaggcgaaattacccaacgcacgaaatacgggaccaaagttatggcacagtggtggttagaacacggtgtgaatcgtggcgtcacgaaacgctcggttatgactttggtgtatgggagcaaagagtttggattccgcgatcaagtgctgagtgacaccattcaaccggcgatcgataacggcaaaggtgacatgtttctgaatccgaatcaggctgctggttacatggcgaaactgatctggaacgcagtgtccgggaccgtagtcgcagcagttgaggcgatgaactggctgaaaagtgcggcgaaattacttgctgctgaagtgaaggatcctaagacggatacagttctgcgtggccgctgcgcagtacattgggtgactcccgacggcttccctgtgtggcaggaatacaagaagcctattcagacgcgcttgaacctgatgttcctcggtcagttccgcttacagcctaccattaacaccaacaaagatagcgagattgatgcacacaaacaggagtctggtatcgctcctaactttgtacacagccaagacggtaaccaccttcgtatgactgtagtgtgggcacacgagaagtacggaatcgaatcttttgcactgattcacgactccttcggtaccattccggctgacgctgcgaacctgttcaaagcagtgcgcgaaactttcgttgacacatatgagtcttgtgatgtactggctgatttctacgaccagttcgctgaccagttgcacgagtctcaacgcgacaaaatgccagcacttccggctaaaggtaacttgaacctccgtgacatcttaaaatcggacttcgcgttcgcg

SEQ ID NO: 1454 - protein, 890 aa, synthetic construct
  REGION 1..890: note = Variant of RNA polymerase
MHHHHHHMNTINIAKNDFSDIELAAIPFNTLADHYGERLAREQLALEHESYEMGEARFRKMFERQLKAGEVADNAAAKPLITTLLPKMIARINDWFEEVKAKRGKRPTAFQFLQEIKPEAVAYITIKTTLACLTSADNTTVQAVASAIGRAIEDEARFGRIRDLEAKHFKKNVEEQLNKRVGHVYKKAFMQVVEHDMLSKGLLGGEAWSSWHKEDSIHVGVRCIEMLIESTGMVSLHRQNAGVVGQDSETIELAPEYAEAIATRAGALAGISPMFQPCVVPPKPWTGITGGGYWAAGRKPLQLVRTRSLAALRRYEEVSMPEVIKAVNIAQNTAWRINKKVLDVANTITQWQHCPVADVPAMDRGEMPARPLDIDTNEIALKAWKKEASAFYRKDKARVSRRLSMEFMLSQANKFANYEAIWFPQNMDWRGRVYAVPMFNPQGNDMTKGLLTFAQEKPIGEDGFYWLKIHGANTAGVDKVPFPQRIKFVEDNHTNIMECAKAPLENTWWAEQDSPFCFLAFCFEYAGVINSGLSYNVSLPLAFDGSCSGLQHFSAMLRDEIGGKAVNLLPSAEYQDIYRIVSDKVNEMLKQDLINGTSTTVETVTDKKTGEITQRTKYGTKVMAQWWLEHGVNRGVTKRSVMTLVYGSKEFGFRDQVLSDTIQPAIDNGKGDMFLNPNQAAGYMAKLIWNAVSGTVVAAVEAMNWLKSAAKLLAAEVKDPKTDTVLRGRCAVHWVTPDGFPVWQEYKKPIQTRLNLMFLGQFRLQPTINTNKDSEIDAHKQESGIAPNFVHSQDGNHLRMTVVWAHEKYGIESFALIHDSFGTIPADAANLFKAVRETFVDTYESCDVLADFYDQFADQLHESQRDKMPALPAKGNLNLRDILKSDFAFA

SEQ ID NO: 1455 - DNA, 2670 bp, synthetic construct
  misc_feature 1..2670: note = Variant of RNA polymerase
  source 1..2670: mol_type = other DNA
atgcaccatcaccatcaccatatgaacacgattaacattgctaagaacgacttctctgacatcgaactggctgctatcccgttcaacactctggctgaccattacggtgagcgtttagctcgcgaacagttggcccttgagcatgagtcttacgagatgggtgaagcacgcttccgcaagatgtttgagcgtcaacttaaagctggtgaggttgcggataacgctgccgccaagcctctcatcactaccctactccctaagatgattgcacgcatcaacgactggtttgaggaagtgaaagctaagcgcggcaagcgcccgacagccttccagttcctgcaagaaatcaagccggaagccgtagcgtacatcaccattaagaccactctggcttgcctaaccagtgcggacaatacaaccgttcaggctgtagcaagcgcaatcggtcgggccattgaggacgaggctcgcttcggtcgtatccgtgaccttgaagctaagcacttcaagaagaacgttgaggaacaactcaacaagcgcgtagggcacgtctacaagaaagcatttatgcaagttgtcgagcacgacatgctctctaagggtctactcggtggcgaggcgtggtcttcgtggcataaggaagactctattcatgtaggagtacgctgcatcgagatgctcattgagtcaaccggaatggttagcttacaccgccaaaatgctggcgtagtaggtcaagactctgagactatcgaactcgcacctgaatacgctgaggctatcgcaacccgtgcaggtgcgctggctggcatctctccgatgttccaaccttgcgtagttcctcctaagccgtggactggcattactggtggtggctattgggctgcggggcgcaaacccctgcagttagtacgtactcgcagtctggcggcgcttcgccgctatgaagaagtgtcgatgccggaggtcatcaaagcagtcaacattgcgcagaatacagcatggcgtattaacaagaaagttctcgacgtagcgaataccatcacccaatggcagcactgtccagtcgcggatgtgcctgcgatggatcgtggcgaaatgccagctcgtccgttggacatcgataccaacgagattgcacttaaagcgtggaagaaagaagcttccgcgttctaccgcaaagacaaagcacgcgttagccgtcgtctgtcaatggagtttatgttatctcaggcgaacaagtttgcgaattatgaggcaatctggtttccgcaaaacatggattggcgtgggcgcgtgtacgctgtcccgatgttcaatcctcagggcaacgatatgacgaaaggcctgctgacctttgcgcaggagaaacccattggtgaagacggcttctattggctcaagattcatggcgcaaatacagctggagtggataaagtaccgtttccacaacgcatcaaatttgttgaggataaccatacgaatattatggaatgcgcgaaagcaccgctggaaaacacttggtgggcggaacaggactcgccgttctgttttctggcgttctgctttgagtatgctggcgtcatcaatagtggtctgtcgtacaactgtagcttgcctctggcatttgatggtagttgctccggcctgcaacatttctcagcgatgttacgcgacgaaattggcggcaaagctgtgaatctcctcccatctgcggaataccaggatatttatcgtatcgtcagcaagaaagttaacgagatgctgaaacaagatctgattaacggtacctctaccaccgtggaaacggtgactgataagaagacaggcgaaattacccaacgcacgaaatacgggaccaaagttatggcacagtggtggttagaacacggtgtgaatcgtggcgtcacgaaacgctcggttatgactttggtgtatgggagcaaagagtttggattccgcgatcaagtgctgagtgacaccattcaaccggcgatcgataacggcaaaggtgacatgtttctgaatccgaatcaggctgctggttacatggcgaaactgatctggaacgcagtgtccgggaccgtagtcgcagcagttgaggcgatgaactggctgaaaagtgcggcgaaattacttgctgctgaagtgaaggatcctaagacggatacagttctgcgtggccgctgcgcagtacattgggtgactcccgacggcttccctgtgtggcaggaatacaagaagcctattcagacgcgcttgaacctgatgttcctcggtcagttccgcttacagcctaccattaacaccaacaaagatagcgagattgatgcacacaaacaggagtctggtatcgctcctaactttgtacacagccaagacggtaaccaccttcgtatgactgtagtgtgggcacacgagaagtacggaatcgaatcttttgcactgattcacgactccttcggtaccattccggctgacgctgcgaacctgttcaaagcagtgcgcgaaactttcgttgacacatatgagtcttgtgatgtactggctgatttctacgaccagttcgctgaccagttgcacgagtctcaacgcgacaaaatgccagcacttccggctaaaggtaacttgaacctccgtgacatcttaaaatcggacttcgcgttcgcg

SEQ ID NO: 1456 - protein, 890 aa, synthetic construct
  REGION 1..890: note = Variant of RNA polymerase
MHHHHHHMNTINIAKNDFSDIELAAIPFNTLADHYGERLAREQLALEHESYEMGEARFRKMFERQLKAGEVADNAAAKPLITTLLPKMIARINDWFEEVKAKRGKRPTAFQFLQEIKPEAVAYITIKTTLACLTSADNTTVQAVASAIGRAIEDEARFGRIRDLEAKHFKKNVEEQLNKRVGHVYKKAFMQVVEHDMLSKGLLGGEAWSSWHKEDSIHVGVRCIEMLIESTGMVSLHRQNAGVVGQDSETIELAPEYAEAIATRAGALAGISPMFQPCVVPPKPWTGITGGGYWAAGRKPLQLVRTRSLAALRRYEEVSMPEVIKAVNIAQNTAWRINKKVLDVANTITQWQHCPVADVPAMDRGEMPARPLDIDTNEIALKAWKKEASAFYRKDKARVSRRLSMEFMLSQANKFANYEAIWFPQNMDWRGRVYAVPMFNPQGNDMTKGLLTFAQEKPIGEDGFYWLKIHGANTAGVDKVPFPQRIKFVEDNHTNIMECAKAPLENTWWAEQDSPFCFLAFCFEYAGVINSGLSYNCSLPLAFDGSCSGLQHFSAMLRDEIGGKAVNLLPSAEYQDIYRIVSKKVNEMLKQDLINGTSTTVETVTDKKTGEITQRTKYGTKVMAQWWLEHGVNRGVTKRSVMTLVYGSKEFGFRDQVLSDTIQPAIDNGKGDMFLNPNQAAGYMAKLIWNAVSGTVVAAVEAMNWLKSAAKLLAAEVKDPKTDTVLRGRCAVHWVTPDGFPVWQEYKKPIQTRLNLMFLGQFRLQPTINTNKDSEIDAHKQESGIAPNFVHSQDGNHLRMTVVWAHEKYGIESFALIHDSFGTIPADAANLFKAVRETFVDTYESCDVLADFYDQFADQLHESQRDKMPALPAKGNLNLRDILKSDFAFA

SEQ ID NO: 1457 - DNA, 2670 bp, synthetic construct
  misc_feature 1..2670: note = Variant of RNA polymerase
  source 1..2670: mol_type = other DNA
atgcaccatcaccatcaccatatgaacacgattaacattgctaagaacgacttctctgacatcgaactggctgctatcccgttcaacactctggctgaccattacggtgagcgtttagctcgcgaacagttggcccttgagcatgagtcttacgagatgggtgaagcacgcttccgcaagatgtttgagcgtcaacttaaagctggtgaggttgcggataacgctgccgccaagcctctcatcactaccctactccctaagatgattgcacgcatcaacgactggtttgaggaagtgaaagctaagcgcggcaagcgcccgacagccttccagttcctgcaagaaatcaagccggaagccgtagcgtacatcaccattaagaccactctggcttgcctaaccagtgcggacaatacaaccgttcaggctgtagcaagcgcaatcggtcgggccattgaggacgaggctcgcttcggtcgtatccgtgaccttgaagctaagcacttcaagaagaacgttgaggaacaactcaacaagcgcgtagggcacgtctacaagaaagcatttatgcaagttgtcgagcacgacatgctctctaagggtctactcggtggcgaggcgtggtcttcgtggcataaggaagactctattcatgtaggagtacgctgcatcgagatgctcattgagtcaaccggaatggttagcttacaccgccaaaatgctggcgtagtaggtcaagactctgagactatcgaactcgcacctgaatacgctgaggctatcgcaacccgtgcaggtgcgctggctggcatctctccgatgttccaaccttgcgtagttcctcctaagccgtggactggcattactggtggtggctattgggctgcggggcgcaaacccctgcagttagtacgtactcgcagtctggcggcgcttcgccgctatgaagaagtgtcgatgccggaggtcatcaaagcagtcaacattgcgcagaatacagcatggcgtattaacaagaaagttctcgacgtagcgaataccatcacccaatggcagcactgtccagtcgcggatgtgcctgcgatggatcgtggcgaaatgccagctcgtccgttggacatcgataccaacgagattgcacttaaagcgtggaagaaagaagcttccgcgttctaccgcaaagacaaagcacgcgttagccgtcgtctgtcaatggagtttatgttatctcaggcgaacaagtttgcgaattatgaggcaatctggtttccgcaaaacatggattggcgtgggcgcgtgtacgctgtcccgatgttcaatcctcagggcaacgatatgacgaaaggcctgctgacctttgcgcaggagaaacccattggtgaagacggcttctattggctcaagattcatggcgcaaatacagctggagtggataaagtaccgtttccacaacgcatcaaatttgttgaggataaccatacgaatattatggaatgcgcgaaagcaccgctggaaaacacttggtgggcggaacaggactcgccgttccgctttctggcgttctgctttgagtatgctggcgtcatcaatagtggtctgtcgtacaactgtagcttgcctctggcatttgatggtagttgctccggcctgcaacatttctcagcgatgttacgcgacgaaattggcggcaaagctgtgaatctcctcccatctgcggaataccaggatatttatcgtatcgtcagcgacaaagttaacgagatgctgaaacaagatctgattaacggtacctctaccaccgtggaaacggtgactgataaaaagacaggcgaaattacccaacgcacgaaatacgggaccaaagttatggcacagtggtggttagaacacggtgtgaatcgtggcgtcacgaaacgctcggttatgactttggtgtatgggagcaaagagtttggattccgcgatcaagtgctgagtgacaccattcaaccggcgatcgataacggcaaaggtgacatgtttctgaatccgaatcaggctgctggttacatggcgaaactgatctggaacgcagtgtccgggaccgtagtcgcagcagttgaggcgatgaactggctgaaaagtgcggcgaaattacttgctgctgaagtgaaggatcgtaagacggatacagttctgcgtggccgctgcgcagtacattgggtgactcccgacggcttccctgtgtggcaggaatacaagaagcctattcagacgcgcttgaacctgatgttcctcggtcagttccgcttacagcctaccattaacaccaacaaagatagcgagattgatgcacacaaacaggagtctggtatcgctcctaactttgtacacagccaagacggtaaccaccttcgtatgactgtagtgtgggcacacgagaagtacggaatcgaatcttttgcactgattcacgactccttcggtaccattccggctgacgctgcgaacctgttcaaagcagtgcgcgaaactttcgttgacacatatgagtcttgtgatgtactggctgatttctacgaccagttcgctgaccagttgcacgagtctcaacgcgacaaaatgccagcacttccggctaaaggtaatttgaacctccgtgacatcttaaaatcggacttcgcgttcgcg

SEQ ID NO: 1458 - protein, 890 aa, synthetic construct
  REGION 1..890: note = Variant of RNA polymerase
MHHHHHHMNTINIAKNDFSDIELAAIPFNTLADHYGERLAREQLALEHESYEMGEARFRKMFERQLKAGEVADNAAAKPLITTLLPKMIARINDWFEEVKAKRGKRPTAFQFLQEIKPEAVAYITIKTTLACLTSADNTTVQAVASAIGRAIEDEARFGRIRDLEAKHFKKNVEEQLNKRVGHVYKKAFMQVVEHDMLSKGLLGGEAWSSWHKEDSIHVGVRCIEMLIESTGMVSLHRQNAGVVGQDSETIELAPEYAEAIATRAGALAGISPMFQPCVVPPKPWTGITGGGYWAAGRKPLQLVRTRSLAALRRYEEVSMPEVIKAVNIAQNTAWRINKKVLDVANTITQWQHCPVADVPAMDRGEMPARPLDIDTNEIALKAWKKEASAFYRKDKARVSRRLSMEFMLSQANKFANYEAIWFPQNMDWRGRVYAVPMFNPQGNDMTKGLLTFAQEKPIGEDGFYWLKIHGANTAGVDKVPFPQRIKFVEDNHTNIMECAKAPLENTWWAEQDSPFRFLAFCFEYAGVINSGLSYNCSLPLAFDGSCSGLQHFSAMLRDEIGGKAVNLLPSAEYQDIYRIVSDKVNEMLKQDLINGTSTTVETVTDKKTGEITQRTKYGTKVMAQWWLEHGVNRGVTKRSVMTLVYGSKEFGFRDQVLSDTIQPAIDNGKGDMFLNPNQAAGYMAKLIWNAVSGTVVAAVEAMNWLKSAAKLLAAEVKDRKTDTVLRGRCAVHWVTPDGFPVWQEYKKPIQTRLNLMFLGQFRLQPTINTNKDSEIDAHKQESGIAPNFVHSQDGNHLRMTVVWAHEKYGIESFALIHDSFGTIPADAANLFKAVRETFVDTYESCDVLADFYDQFADQLHESQRDKMPALPAKGNLNLRDILKSDFAFA

SEQ ID NO: 1459 - DNA, 2670 bp, synthetic construct
  misc_feature 1..2670: note = Variant of RNA polymerase
  source 1..2670: mol_type = other DNA
atgcaccatcaccatcaccatatgaacacgattaacattgctaagaacgacttctctgacatcgaactggctgctatcccgttcaacactctggctgaccattacggtgagcgtttagctcgcgaacagttggcccttgagcatgagtcttacgagatgggtgaagcacgcttccgcaagatgtttgagcgtcaacttaaagctggtgaggttgcggataacgctgccgccaagcctctcatcactaccctactccctaagatgattgcacgcatcaacgactggtttgaggaagtgaaagctaagcgcggcaagcgcccgacagccttccagttcctgcaagaaatcaagccggaagccgtagcgtacatcaccattaagaccactctggcttgcctaaccagtgcggacaatacaaccgttcaggctgtagcaagcgcaatcggtcgggccattgaggacgaggctcgcttcggtcgtatccgtgaccttgaagctaagcacttcaagaagaacgttgaggaacaactcaacaagcgcgtagggcacgtctacaagaaagcatttatgcaagttgtcgagcacgacatgctctctaagggtctactcggtggcgaggcgtggtcttcgtggcataaggaagactctattcatgtaggagtacgctgcatcgagatgctcattgagtcaaccggaatggttagcttacaccgccaaaatgctggcgtagtaggtcaagactctgagactatcgaactcgcacctgaatacgctgaggctatcgcaacccgtgcaggtgcgctggctggcatctctccgatgttccaaccttgcgtagttcctcctaagccgtggactggcattactggtggtggctattgggctgcggggcgcaaacccctgcagttagtacgtactcgcagtctggcggcgcttcgccgctatgaagaagtgtcgatgccggaggtcatcaaagcagtcaacattgcgcagaatacagcatggcgtattaacaagaaagttctcgacgtagcgaataccatcacccaatggcagcactgtccagtcgcggatgtgcctgcgatggatcgtggcgaaatgccaatgcgtccgttggacatcgataccaacgagattgcacttaaagcgtggaagaaagaagcttccgcgttctaccgcaaagacaaagcacgcgttagccgtcgtctgtcaatggagtttatgttatctcaggcgaacaagtttgcgaattatgaggcaatctggtttccgcaaaacatggattggcgtgggcgcgtgtacgctgtcccgatgttcaatcctcagggcaacgatatgacgaaaggcctgctgacctttgcgcaggagaaacccattggtgaagacggcttctattggctcaagattcatggcgcaaatacagctggagtggataaagtaccgtttccacaacgcatcaaatttgttgaggataaccatacgaatattatggaatgcgcgaaagcaccgctggaaaacacttggtgggcggaacaggactcgccgttctgttttctggcgttctgctttgagtatgctggcgtcatcaatagtggtctgtcgtacaactgtagcttgcctctggcatttgatggtagttgctccggcctgcaacatttctcagcgatgttacgcgacgaaattggcggcaaagctgtgaatctcctcccatctgcggaataccaggatatttatcgtatcgtcagcgacaaagttaacgagatgctgaaacaagatctgattaacggtacctctaccaccgtggaaacggtgactgataagaagacaggcgaaattacccaacgcacgaaatacgggaccaaagttatggcacagtggtggttagaacacggtgtgaatcgtggcgtcacgaaacgctcggttatgactttggtgtatgggagcaaagagtttggattccgcgatcaagtgctgagtgacaccattcaaccggcgatcgataacggcaaaggtgacatgtttctgaatccgaatcaggctgctggttacatggcgaaactgatctggaacgcagtgtccgggaccgtagtcgcagcagttgaggcgatgaactggctgaaaagtgcggcgaaattacttgctgctgaagtgaaggatcctaagacggatacagttctgcgtggccgctgcgcagtacattgggtgactcccgacggcttccctgtgtggcaggaatacaagaagcctattcagacgcgcttgaacctgatgttcctcggtcagttccgcttacagcctaccattaacaccaacaaagatagcgagattgatgcacacaaacaggagtctggtatcgctcctaactttgtacacagccaagacggtaaccaccttcgtatgactgtagtgtgggcacacgagaagtacggaatcgaatcttttgcactgattcacgactccttcggtaccattccggctgacgctgcgaacctgttcaaagcagtgcgcgaaactttcgttgacacatatgagtcttgtgatgtactggctgatttctacgaccagttcgctgaccagttgcacgagtctcaacgcgacaaaatgccagcacttccggctaaaggtaacttgaacctccgtgacatcttaaaatcggacttcgcgttcgcg

SEQ ID NO: 1460 - protein, 890 aa, synthetic construct
  REGION 1..890: note = Variant of RNA polymerase
MHHHHHHMNTINIAKNDFSDIELAAIPFNTLADHYGERLAREQLALEHESYEMGEARFRKMFERQLKAGEVADNAAAKPLITTLLPKMIARINDWFEEVKAKRGKRPTAFQFLQEIKPEAVAYITIKTTLACLTSADNTTVQAVASAIGRAIEDEARFGRIRDLEAKHFKKNVEEQLNKRVGHVYKKAFMQVVEHDMLSKGLLGGEAWSSWHKEDSIHVGVRCIEMLIESTGMVSLHRQNAGVVGQDSETIELAPEYAEAIATRAGALAGISPMFQPCVVPPKPWTGITGGGYWAAGRKPLQLVRTRSLAALRRYEEVSMPEVIKAVNIAQNTAWRINKKVLDVANTITQWQHCPVADVPAMDRGEMPMRPLDIDTNEIALKAWKKEASAFYRKDKARVSRRLSMEFMLSQANKFANYEAIWFPQNMDWRGRVYAVPMFNPQGNDMTKGLLTFAQEKPIGEDGFYWLKIHGANTAGVDKVPFPQRIKFVEDNHTNIMECAKAPLENTWWAEQDSPFCFLAFCFEYAGVINSGLSYNCSLPLAFDGSCSGLQHFSAMLRDEIGGKAVNLLPSAEYQDIYRIVSDKVNEMLKQDLINGTSTTVETVTDKKTGEITQRTKYGTKVMAQWWLEHGVNRGVTKRSVMTLVYGSKEFGFRDQVLSDTIQPAIDNGKGDMFLNPNQAAGYMAKLIWNAVSGTVVAAVEAMNWLKSAAKLLAAEVKDPKTDTVLRGRCAVHWVTPDGFPVWQEYKKPIQTRLNLMFLGQFRLQPTINTNKDSEIDAHKQESGIAPNFVHSQDGNHLRMTVVWAHEKYGIESFALIHDSFGTIPADAANLFKAVRETFVDTYESCDVLADFYDQFADQLHESQRDKMPALPAKGNLNLRDILKSDFAFA

SEQ ID NO: 1461 - DNA, 2670 bp, synthetic construct
  misc_feature 1..2670: note = Variant of RNA polymerase
  source 1..2670: mol_type = other DNA
atgcaccatcaccatcaccatatgaacacgattaacattgctaagaacgacttctctgacatcgaactggctgctatcccgttcaacactctggctgaccattacggtgagcgtttagctcgcgaacagttggcccttgagcatgagtcttacgagatgggtgaagcacgcttccgcaagatgtttgagcgtcaacttaaagctggtgaggttgcggataacgctgccgccaagcctctcatcactaccctactccctaagatgattgcacgcatcaacgactggtttgaggaagtgaaagctaagcgcggcaagcgcccgacagccttccagttcctgcaagaaatcaagccggaagccgtagcgtacatcaccattaagaccactctggcttgcctaaccagtgcggacaatacaaccgttcaggctgtagcaagcgcaatcggtcgggccattgaggacgaggctcgcttcggtcgtatccgtgaccttgaagctaagcacttcaagaagaacgttgaggaacaactcaacaagcgcgtagggcacgtctacaagaaagcatttatgcaagttgtcgagcacgacatgctctctaagggtctactcggtggcgaggcgtggtcttcgtggcataaggaagactctattcatgtaggagtacgctgcatcgagatgctcattgagtcaaccggaatggttagcttacaccgccaaaatgctggcgtagtaggtcaagactctgagactatcgaactcgcacctgaatacgctgaggctatcgcaacccgtgcaggtgcgctggctggcatctctccgatgttccaaccttgcgtagttcctcctaagccgtggactggcattactggtggtggctattgggctgcggggcgcaaacccctgcagttagtacgtactcgcagtctggcggcgcttcgccgctatgaagaagtgtcgatgccggaggtcatcaaagcagtcaacattgcgcagaatacagcatggcgtattaacaagaaagttctcgacgtagcgaataccatcacccaatggcagcactgtccagtcgcggatgtgcctgcgatggatcgtggcgaaatgccagctcgtccgttggacatcgataccaacgagattgcacttaaagcgtggaagaaagaagcttccgcgttctaccgcaaagacaaagcacgcgttagccgtcgtctgtcaatggagtttatgttatctcaggcgaacaagtttgcgaattatgaggcaatctggtttccgcaaaacatggattggcgtgggcgcgtgtacgctgtctcgatgttcaatcctcagggcaacgatatgacgaaaggcctgctgacctttgcgcaggagaaacccattggtgaagacggcttctattggctcaagattcatggcgcaaatacagctggagtggataaagtaccgtttccacaacgcatcaaatttgttgaggataaccatacgaatattatggaatgcgcgaaagcaccgctggaaaacacttggtgggcggaacaggactcgccgttctgttttctggcgttctgctttgagtatgctggcgtcatcaatagtggtctgtcgtacaactgtagcttgcctctggcatttgatggtagttgctccggcctgcaacatttctcagcgatgttacgcgacgaaattggcggcaaagctgtgaatctcctcccatctgcggaataccaggatatttatcgtatcgtcagcgacaaagttaacgagatgctgaaacaagatctgattaacggtacctctaccaccgtggaaacggtgactgataagaagacaggcgaaattacccaacgcacgaaatacgggaccaaagttatggcacagtggtggttagaacacggtgtgaatcgtggcgtcacgaaacgctcggttatgactttggtgtatgggagcaaagagtttggattccgcgatcaagtgctgagtgacaccattcaaccggcgatcgataacggcaaaggtgacatgtttctgaatccgaatcaggctgctggttacatggcgaaactgatctggaacgcagtgtccgggaccgtagtcgcagcagttgaggcgatgaactggctgaaaagtgcggcgaaattacttgctgctgaagtgaaggatcctaagacggatacagttctgcgtggccgctgcgcagtacattgggtgactcccgacggcttccctgtgtggcaggaatacaagaagcctattcagacgcgcttgaacctgatgttcctcggtcagttccgcttacagcctaccattaacaccaacaaagatagcgagattgatgcacacaaacaggagtctggtatcgctcctaactttgtacacagccaagacggtaaccaccttcgtatgactgtagtgtgggcacacgagaagtacggaatcgaatcttttgcactgattcacgactccttcggtaccattccggctgacgctgcgaacctgttcaaagcagtgcgcgaaactttcgttgacacatatgagtcttgtgatgtactggctgatttctacgaccagttcgctgaccagttgcacgagtctcaacgcgacaaaatgccagcacttccggctaaaggtaacttgaacctccgtgacatcttaaaatcggacttcgcgttcgcg

SEQ ID NO: 1462 - protein, 890 aa, synthetic construct
  REGION 1..890: note = Variant of RNA polymerase
MHHHHHHMNTINIAKNDFSDIELAAIPFNTLADHYGERLAREQLALEHESYEMGEARFRKMFERQLKAGEVADNAAAKPLITTLLPKMIARINDWFEEVKAKRGKRPTAFQFLQEIKPEAVAYITIKTTLACLTSADNTTVQAVASAIGRAIEDEARFGRIRDLEAKHFKKNVEEQLNKRVGHVYKKAFMQVVEHDMLSKGLLGGEAWSSWHKEDSIHVGVRCIEMLIESTGMVSLHRQNAGVVGQDSETIELAPEYAEAIATRAGALAGISPMFQPCVVPPKPWTGITGGGYWAAGRKPLQLVRTRSLAALRRYEEVSMPEVIKAVNIAQNTAWRINKKVLDVANTITQWQHCPVADVPAMDRGEMPARPLDIDTNEIALKAWKKEASAFYRKDKARVSRRLSMEFMLSQANKFANYEAIWFPQNMDWRGRVYAVSMFNPQGNDMTKGLLTFAQEKPIGEDGFYWLKIHGANTAGVDKVPFPQRIKFVEDNHTNIMECAKAPLENTWWAEQDSPFCFLAFCFEYAGVINSGLSYNCSLPLAFDGSCSGLQHFSAMLRDEIGGKAVNLLPSAEYQDIYRIVSDKVNEMLKQDLINGTSTTVETVTDKKTGEITQRTKYGTKVMAQWWLEHGVNRGVTKRSVMTLVYGSKEFGFRDQVLSDTIQPAIDNGKGDMFLNPNQAAGYMAKLIWNAVSGTVVAAVEAMNWLKSAAKLLAAEVKDPKTDTVLRGRCAVHWVTPDGFPVWQEYKKPIQTRLNLMFLGQFRLQPTINTNKDSEIDAHKQESGIAPNFVHSQDGNHLRMTVVWAHEKYGIESFALIHDSFGTIPADAANLFKAVRETFVDTYESCDVLADFYDQFADQLHESQRDKMPALPAKGNLNLRDILKSDFAFA

SEQ ID NO: 1463 - DNA, 2670 bp, synthetic construct
  misc_feature 1..2670: note = Variant of RNA polymerase
  source 1..2670: mol_type = other DNA
atgcaccatcaccatcaccatatgaacacgattaacattgctaagaacgacttctctgacatcgaactggctgctatcccgttcaacactctggctgaccattacggtgagcgtttagctcgcgaacagttggcccttgagcatgagtcttacgagatgggtgaagcacgcttccgcaagatgtttgagcgtcaacttaaagctggtgaggttgcggataacgctgccgccaagcctctcatcactaccctactccctaagatgattgcacgcatcaacgactggtttgaggaagtgaaagctaagcgcggcaagcgcccgacagccttccagttcctgcaagaaatcaagccggaagccgtagcgtacatcaccattaagaccactctggcttgcctaaccagtgcggacaatacaaccgttcaggctgtagcaagcgcaatcggtcgggccattgaggacgaggctcgcttcggtcgtatccgtgaccttgaagctaagcacttcaagaagaacgttgaggaacaactcaacaagcgcgtagggcacgtctacaagaaagcatttatgcaagttgtcgagcacgacatgctctctaagggtctactcggtggcgaggcgtggtcttcgtggcataaggaagactctattcatgtaggagtacgctgcatcgagatgctcattgagtcaaccggaatggttagcttacaccgccaaaatgctggcgtagtaggtcaagactctgagactatcgaactcgcacctgaatacgctgaggctatcgcaacccgtgcaggtgcgctggctggcatctctccgatgttccaaccttgcgtagttcctcctaagccgtggactggcattactggtggtggctattgggctgcggggcgcaaacccctgcagttagtacgtactcgcagtctggcggcgcttcgccgctatgaagaagtgtcgatgccggaggtcatcaaagcagtcaacattgcgcagaatacagcatggcgtattaacaagaaagttctcgacgtagcgaataccatcacccaatggcagcactgtccagtcgcggatgtgcctgcgatggatcgtggcgaaatgccagctcgtccgttggacatcgataccaacgagattgcacttaaagcgtggaagaaagaagcttccgcgttctaccgcaaagacaaagcacgcgttagccgtcgtctgtcaatggagtttatgttatctcaggcgaacaagtttgcgaattatgaggcaatctggtttccgcaaaacatggattggcgtgggcgcgtgtacgctgtcccgatgttcaatcctcagggcaacgatatgacgaaaggcctgctgacctttgcgcaggagaaacccattggtgaagacggcttctattggctcaagattcatggcgcaaatacagctggagtggataaagtaccgtttccacaacgcatcaaatttgttgaggataaccatacgaatattatggaatgcgcgaaagcaccgctggaaaacacttggtgggcggaacaggactcgccgttctgttttctggcgttctgctttgagtatgctggcgtcatcaatagtggtctgtcgtacaactgtagcttgcctctggcatttgatggtagttgctccggcctgcaacatttctcagcgatgttacgcgacgaaattggcggcaaagctgtgaatctcctcccatctgcggaataccaggatatttatcgtatcgtcagcgacaaagttaacgagatgctgaaacaagatctgattaacggtacctctaccaccgtggaaacggtgactgataagaagacaggcgaaattacccaacgcacgaaatacgggaccaaagttctggcacagtggtggttagaacacggtgtgaatcgtggcgtcacgaaacgctcggttatgactttggtgtatgggagcaaagagtttggattccgcgatcaagtgctgagtgacaccattcaaccggcgatcgataacggcaaaggtgacatgtttctgaatccgaatcaggctgctggttacatggcgaaactgatctggaacgcagtgtccgggaccgtagtcgcagcagttgaggcgatgaactggctgaaaagtgcggcgaaattacttgctgctgaagtgaaggatcctaagacggatacagttctgcgtggccgctgcgcagtacattgggtgactcccgacggcttccctgtgtggcaggaatacaagaagcctattcagacgcgcttgaacctgatgttcctcggtcagttccgcttacagcctaccattaacaccaacaaagatagcgagattgatgcacacaaacaggagtctggtatcgctcctaactttgtacacagccaagacggtaaccaccttcgtatgactgtagtgtgggcacacgagaagtacggaatcgaatcttttgcactgattcacgactccttcggtaccattccggctgacgctgcgaacctgttcaaagcagtgcgcgaaactttcgttgacacatatgagtcttgtgatgtactggctgatttctacgaccagttcgctgaccagttgcacgagtctcaacgcgacaaaatgccagcacttccggctaaaggtaacttgaacctccgtgacatcttaaaatcggacttcgcgttcgcg

SEQ ID NO: 1464 - protein, 890 aa, synthetic construct
  REGION 1..890: note = Variant of RNA polymerase
MHHHHHHMNTINIAKNDFSDIELAAIPFNTLADHYGERLAREQLALEHESYEMGEARFRKMFERQLKAGEVADNAAAKPLITTLLPKMIARINDWFEEVKAKRGKRPTAFQFLQEIKPEAVAYITIKTTLACLTSADNTTVQAVASAIGRAIEDEARFGRIRDLEAKHFKKNVEEQLNKRVGHVYKKAFMQVVEHDMLSKGLLGGEAWSSWHKEDSIHVGVRCIEMLIESTGMVSLHRQNAGVVGQDSETIELAPEYAEAIATRAGALAGISPMFQPCVVPPKPWTGITGGGYWAAGRKPLQLVRTRSLAALRRYEEVSMPEVIKAVNIAQNTAWRINKKVLDVANTITQWQHCPVADVPAMDRGEMPARPLDIDTNEIALKAWKKEASAFYRKDKARVSRRLSMEFMLSQANKFANYEAIWFPQNMDWRGRVYAVPMFNPQGNDMTKGLLTFAQEKPIGEDGFYWLKIHGANTAGVDKVPFPQRIKFVEDNHTNIMECAKAPLENTWWAEQDSPFCFLAFCFEYAGVINSGLSYNCSLPLAFDGSCSGLQHFSAMLRDEIGGKAVNLLPSAEYQDIYRIVSDKVNEMLKQDLINGTSTTVETVTDKKTGEITQRTKYGTKVLAQWWLEHGVNRGVTKRSVMTLVYGSKEFGFRDQVLSDTIQPAIDNGKGDMFLNPNQAAGYMAKLIWNAVSGTVVAAVEAMNWLKSAAKLLAAEVKDPKTDTVLRGRCAVHWVTPDGFPVWQEYKKPIQTRLNLMFLGQFRLQPTINTNKDSEIDAHKQESGIAPNFVHSQDGNHLRMTVVWAHEKYGIESFALIHDSFGTIPADAANLFKAVRETFVDTYESCDVLADFYDQFADQLHESQRDKMPALPAKGNLNLRDILKSDFAFA

SEQ ID NO: 1465 - DNA, 2670 bp, synthetic construct
  misc_feature 1..2670: note = Variant of RNA polymerase
  source 1..2670: mol_type = other DNA
atgcaccatcaccatcaccatatgaacacgattaacattgctaagaacgacttctctgacatcgaactggctgctatcccgttcaacactctggctgaccattacggtgagcgtttagctcgcgaacagttggcccttgagcatgagtcttacgagatgggtgaagcacgcttccgcaagatgtttgagcgtcaacttaaagctggtgaggttgcggataacgctgccgccaagcctctcatcactaccctactccctaagatgattgcacgcatcaacgactggtttgaggaagtgaaagctaagcgcggcaagcgcccgacagccttccagttcctgcaagaaatcaagccggaagccgtagcgtacatcaccattaagaccactctggcttgcctaaccagtgcggacaatacaaccgttcaggctgtagcaagcgcaatcggtcgggccattgaggacgaggctcgcttcggtcgtatccgtgaccttgaagctaagcacttcaagaagaacgttgaggaacaactcaacaagcgcgtagggcacgtctacaagaaagcatttatgcaagttgtcgagcacgacatgctctctaagggtctactcggtggcgaggcgtggtcttcgtggcataaggaagactctattcatgtaggagtacgctgcatcgagatgctcattgagtcaaccggaatggttagcttacaccgccaaaatgctggcgtagtaggtcaagactctgagactatcgaactcgcacctgaatacgctgaggctatcgcaacccgtgcaggtgcgctggctggcatctctccgatgttccaaccttgcgtagttcctcctaagccgtggactggcattactggtggtggctattgggctgcggggcgcaaacccctgcagttagtacgtactcgcagtctggcggcgcttcgccgctatgaagaagtgtcgatgccggaggtcatcaaagcagtcaacattgcgcagaatacagcatggcgtattaacaagaaagttctcgacgtagcgaataccatcacccaatggcagcactgtccagtcgcggatgtgcctgcgatggatcgtggcgaaatgccagctcgtccgttggacatcgataccaacaagattgcacttaaagcgtggaagaaagaagcttccgcgttctaccgcaaagacaaagcacgcgttagccgtcgtctgtcaatggagtttatgttatctcaggcgaacaagtttgcgaattatgaggcaatctggtttccgcaaaacatggattggcgtgggcgcgtgtacgctgtcccgatgttcaatcctcagggcaacgatatgacgaaaggcctgctgacctttgcgcaggagaaacccattggtgaagacggcttctattggctcaagattcatggcgcaaatacagctggagtggataaagtaccgtttccacaacgcatcaaatttgttgaggataaccatacgaatattatggaatgcgcgaaagcaccgctggaaaacacttggtgggcggaacaggactcgccgttctgttttctggcgttctgctttgagtatgctggcgtcatcaatagtggtctgtcgtacaactgtagcttgcctctggcatttgatggtagttgctccggcctgcaacatttctcagcgatgttacgcgacgaaattggcggcaaagctgtgaatctcctcccatctgcggaataccaggatatttatcgtatcgtcagcgacaaagttaacgagatgctgaaacaagatctgattaacggtacctctaccaccgtggaaacggtgactgataagaagacaggcgaaattacccaacgcacgaaatacgggaccaaagttatggcacagtggtggttagaacacggtgtgaatcgtggcgtcacgaaacgctcggttatgactttggtgtatgggagcaaagagtttggattccgcgatcaagtgctgagtgacaccattcaaccggcgatcgataacggcaaaggtgacatgtttctgaatccgaatcaggctgctggttacatggcgaaactgatctggaacgcagtgtccgggaccgtagtcgcagcagttgaggcgatgaactggctgaaaagtgcggcgaaattacttgctgctgaagtgaaggatcctaagacggatacagttctgcgtggccgctgcgcagtacattgggtgactcccgacggcttccctgtgtggcaggaatacaagaagcctattcagacgcgcttgaacctgatgttcctcggtcagttccgcttacagcctaccattaacaccaacaaagatagcgagattgatgcacacaaacaggagtctggtatcgctcctaactttgtacacagccaagacggtaaccaccttcgtatgactgtagtgtgggcacacgagaagtacggaatcgaatcttttgcactgattcacgactccttcggtaccattccggctgacgctgcgaacctgttcaaagcagtgcgcgaaactttcgttgacacatatgagtcttgtgatgtactggctgatttctacgaccagttcgctgaccagttgcacgagtctcaacgcgacaaaatgccagcacttccggctaaaggtaacttgaacctccgtgacatcttaaaatcggacttcgcgttcgcg

SEQ ID NO: 1466 - protein, 890 aa, synthetic construct
  REGION 1..890: note = Variant of RNA polymerase
MHHHHHHMNTINIAKNDFSDIELAAIPFNTLADHYGERLAREQLALEHESYEMGEARFRKMFERQLKAGEVADNAAAKPLITTLLPKMIARINDWFEEVKAKRGKRPTAFQFLQEIKPEAVAYITIKTTLACLTSADNTTVQAVASAIGRAIEDEARFGRIRDLEAKHFKKNVEEQLNKRVGHVYKKAFMQVVEHDMLSKGLLGGEAWSSWHKEDSIHVGVRCIEMLIESTGMVSLHRQNAGVVGQDSETIELAPEYAEAIATRAGALAGISPMFQPCVVPPKPWTGITGGGYWAAGRKPLQLVRTRSLAALRRYEEVSMPEVIKAVNIAQNTAWRINKKVLDVANTITQWQHCPVADVPAMDRGEMPARPLDIDTNKIALKAWKKEASAFYRKDKARVSRRLSMEFMLSQANKFANYEAIWFPQNMDWRGRVYAVPMFNPQGNDMTKGLLTFAQEKPIGEDGFYWLKIHGANTAGVDKVPFPQRIKFVEDNHTNIMECAKAPLENTWWAEQDSPFCFLAFCFEYAGVINSGLSYNCSLPLAFDGSCSGLQHFSAMLRDEIGGKAVNLLPSAEYQDIYRIVSDKVNEMLKQDLINGTSTTVETVTDKKTGEITQRTKYGTKVMAQWWLEHGVNRGVTKRSVMTLVYGSKEFGFRDQVLSDTIQPAIDNGKGDMFLNPNQAAGYMAKLIWNAVSGTVVAAVEAMNWLKSAAKLLAAEVKDPKTDTVLRGRCAVHWVTPDGFPVWQEYKKPIQTRLNLMFLGQFRLQPTINTNKDSEIDAHKQESGIAPNFVHSQDGNHLRMTVVWAHEKYGIESFALIHDSFGTIPADAANLFKAVRETFVDTYESCDVLADFYDQFADQLHESQRDKMPALPAKGNLNLRDILKSDFAFA

SEQ ID NO: 1467 - DNA, 2670 bp, synthetic construct
  misc_feature 1..2670: note = Variant of RNA polymerase
  source 1..2670: mol_type = other DNA
atgcaccatcaccatcaccatatgaacacgattaacattgctaagaacgacttctctgacatcgaactggctgctatcccgttcaacactctggctgaccattacggtgagcgtttagctcgcgaacagttggcccttgagcatgagtcttacgagatgggtgaagcacgcttccgcaagatgtttgagcgtcaacttaaagctggtgaggttgcggataacgctgccgccaagcctctcatcactaccctactccctaagatgattgcacgcatcaacgactggtttgaggaagtgaaagctaagcgcggcaagcgcccgacagccttccagttcctgcaagaaatcaagccggaagccgtagcgtacatcaccattaagaccactctggcttgcctaaccagtgcggacaatacaaccgttcaggctgtagcaagcgcaatcggtcgggccattgaggacgaggctcgcttcggtcgtatccgtgaccttgaagctaagcacttcaagaagaacgttgaggaacaactcaacaagcgcgtagggcacgtctacaagaaagcatttatgcaagttgtcgagcacgacatgctctctaagggtctactcggtggcgaggcgtggtcttcgtggcataaggaagactctattcatgtaggagtacgctgcatcgagatgctcattgagtcaaccggaatggttagcttacaccgccaaaatgctggcgtagtaggtcaagactctgagactatcgaactcgcacctgaatacgctgaggctatcgcaacccgtgcaggtgcgctggctggcatctctccgatgttccaaccttgcgtagttcctcctaagccgtggactggcattactggtggtggctattgggctgcggggcgcaaacccctgcagttagtacgtactcgcagtctggcggcgcttcgccgctatgaagaagtgtcgatgccggaggtcatcaaagcagtcaacattgcgcagaatacagcatggcgtattaacaagaaagttctcgacgtagcgaataccatcacccaatggcagcactgtccagtcgcggatgtgcctgcgatggatcgtggcgaaatgccagctcgtccgttggacatcgataccaacgagattgcacttaaagcgtggaagaaagaagcttccgcgttctaccgcaaagacaaagcacgcgttagccgtcgtctgtcaatggagtttatgttatctcaggcgaacaagtttgcgaattatgaggcaatctggtttccgcaaaacatggattggcgtgggcgcgtgtacgctgtcccgatgttcaatcctcagggcaacgatatgacgaaaggcctgctgacctttgcgcaggagaaacccattggtgaagacggctactattggctcaagattcatggcgcaaatacagctggagtggataaagtaccgtttccacaacgcatcaaatttgttgaggataaccatacgaatattatggaatgcgcgaaagcaccgctggaaaacacttggtgggcggaacaggactcgccgttctgttttctggcgttctgctttgagtatgctggcgtcatcaatagtggtctgtcgtacaactgtagcttgcctctggcatttgatggtagttgctccggcctgcaacatttctcagcgatgttacgcgacgaaattggcggcaaagctgtgaatctcctcccatctgcggaataccaggatatttatcgtatcgtcagcgacaaagttaacgagatgctgaaacaagatctgattaacggtacctctaccaccgtggaaacggtgactgataagaagacaggcgaaattacccaacgcacgaaatacgggaccaaagttatggcacagtggtggttagaacacggtgtgaatcgtggcgtcacgaaacgctcggttatgactttggtgtatgggagcaaagagtttggattccgcgatcaagtgctgagtgacaccattcaaccggcgatcgataacggcaaaggtgacatgtttctgaatccgaatcaggctgctggttacatggcgaaactgatctggaacgcagtgtccgggaccgtagtcgcagcagttgaggcgatgaactggctgaaaagtgcggcgaaattacttgctgctgaagtgaaggatcctaagacggatacagttctgcgtggccgctgcgcagtacattgggtgactcccgacggcttccctgtgtggcaggaatacaagaagcctattcagacgcgcttgaacctgatgttcctcggtcagttccgcttacagcctaccattaacaccaacaaagatagcgagattgatgcacacaaacaggagtctggtatcgctcctaactttgtacacagccaagacggtaaccaccttcgtatgactgtagtgtgggcacacgagaagtacggaatcgaatcttttgcactgattcacgactccttcggtaccattccggctgacgctgcgaacctgttcaaagcagtgcgcgaaactttcgttgacacatatgagtcttgtgatgtactggctgatttctacgaccagttcgctgaccagttgcacgagtctcaacgcgacaaaatgccagcacttccggctaaaggtaacttgaacctccgtgacatcttaaaatcggacttcgcgttcgcg

SEQ ID NO: 1468 - protein, 890 aa, synthetic construct
  REGION 1..890: note = Variant of RNA polymerase
MHHHHHHMNTINIAKNDFSDIELAAIPFNTLADHYGERLAREQLALEHESYEMGEARFRKMFERQLKAGEVADNAAAKPLITTLLPKMIARINDWFEEVKAKRGKRPTAFQFLQEIKPEAVAYITIKTTLACLTSADNTTVQAVASAIGRAIEDEARFGRIRDLEAKHFKKNVEEQLNKRVGHVYKKAFMQVVEHDMLSKGLLGGEAWSSWHKEDSIHVGVRCIEMLIESTGMVSLHRQNAGVVGQDSETIELAPEYAEAIATRAGALAGISPMFQPCVVPPKPWTGITGGGYWAAGRKPLQLVRTRSLAALRRYEEVSMPEVIKAVNIAQNTAWRINKKVLDVANTITQWQHCPVADVPAMDRGEMPARPLDIDTNEIALKAWKKEASAFYRKDKARVSRRLSMEFMLSQANKFANYEAIWFPQNMDWRGRVYAVPMFNPQGNDMTKGLLTFAQEKPIGEDGYYWLKIHGANTAGVDKVPFPQRIKFVEDNHTNIMECAKAPLENTWWAEQDSPFCFLAFCFEYAGVINSGLSYNCSLPLAFDGSCSGLQHFSAMLRDEIGGKAVNLLPSAEYQDIYRIVSDKVNEMLKQDLINGTSTTVETVTDKKTGEITQRTKYGTKVMAQWWLEHGVNRGVTKRSVMTLVYGSKEFGFRDQVLSDTIQPAIDNGKGDMFLNPNQAAGYMAKLIWNAVSGTVVAAVEAMNWLKSAAKLLAAEVKDPKTDTVLRGRCAVHWVTPDGFPVWQEYKKPIQTRLNLMFLGQFRLQPTINTNKDSEIDAHKQESGIAPNFVHSQDGNHLRMTVVWAHEKYGIESFALIHDSFGTIPADAANLFKAVRETFVDTYESCDVLADFYDQFADQLHESQRDKMPALPAKGNLNLRDILKSDFAFA

SEQ ID NO: 1469 - DNA, 2670 bp, synthetic construct
  misc_feature 1..2670: note = Variant of RNA polymerase
  source 1..2670: mol_type = other DNA
atgcaccatcaccatcaccatatgaacacgattaacattgctaagaacgacttctctgacatcgaactggctgctatcccgttcaacactctggctgaccattacggtgagcgtttagctcgcgaacagttggcccttgagcatgagtcttacgagatgggtgaagcacgcttccgcaagatgtttgagcgtcaacttaaagctggtgaggttgcggataacgctgccgccaagcctctcatcactaccctactccctaagatgattgcacgcatcaacgactggtttgaggaagtgaaagctaagcgcggcaagcgcccgacagccttccagttcctgcaagaaatcaagccggaagccgtagcgtacatcaccattaagaccactctggcttgcctaaccagtgcggacaatacaaccgttcaggctgtagcaagcgcaatcggtcgggccattgaggacgaggctcgcttcggtcgtatccgtgaccttgaagctaagcacttcaagaagaacgttgaggaacaactcaacaagcgcgtagggcacgtctacaagaaagcatttatgcaagttgtcgagcacgacatgctctctaagggtctactcggtggcgaggcgtggtcttcgtggcataaggaagactctattcatgtaggagtacgctgcatcgagatgctcattgagtcaaccggaatggttagcttacaccgccaaaatgctggcgtagtaggtcaagactctgagactatcgaactcgcacctgaatacgctgaggctatcgcaacccgtgcaggtgcgctggctggcatctctccgatgttccaaccttgcgtagttcctcctaagccgtggactggcattactggtggtggctattgggctgcggggcgcaaacccctgcagttagtacgtactcgcagtctggcggcgcttcgccgctatgaagaagtgtcgatgccggaggtcatcaaagcagtcaacattgcgcagaatacagcatggcgtattaacaagaaagttctcgacgtagcgaataccatcacccaatggcagcactgtccagtcgcggatgtgcctgcgatggatcgtggcgaaatgccagctcgtccgttggacatcgataccaacgagattgcacttactgcgtggaagaaagaagcttccgcgttctaccgcaaagacaaagcacgcgttagccgtcgtctgtcaatggagtttatgttatctcaggcgaacaagtttgcgaattatgaggcaatctggtttccgcaaaacatggattggcgtgggcgcgtgtacgctgtcccgatgttcaatcctcagggcaacgatatgacgaaaggcctgctgacctttgcgcaggagaaacccattggtgaagacggcttctattggctcaagattcatggcgcaaatacagctggagtggataaagtaccgtttccacaacgcatcaaatttgttgaggataaccatacgaatattatggaatgcgcgaaagcaccgctggaaaacacttggtgggcggaacaggactcgccgttctgttttctggcgttctgctttgagtatgctggcgtcatcaatagtggtctgtcgtacaactgtagcttgcctctggcatttgatggtagttgctccggcctgcaacatttctcagcgatgttacgcgacgaaattggcggcaaagctgtgaatctcctcccatctgcggaataccaggatatttatcgtatcgtcagcgacaaagttaacgagatgctgaaacaagatctgattaacggtacctctaccaccgtggaaacggtgactgataagaagacaggcgaaattacccaacgcacgaaatacgggaccaaagttatggcacagtggtggttagaacacggtgtgaatcgtggcgtcacgaaacgctcggttatgactttggtgtatgggagcaaagagtttggattccgcgatcaagtgctgagtgacaccattcaaccggcgatcgataacggcaaaggtgacatgtttctgaatccgaatcaggctgctggttacatggcgaaactgatctggaacgcagtgtccgggaccgtagtcgcagcagttgaggcgatgaactggctgaaaagtgcggcgaaattacttgctgctgaagtgaaggatcctaagacggatacagttctgcgtggccgctgcgcagtacattgggtgactcccgacggcttccctgtgtggcaggaatacaagaagcctattcagacgcgcttgaacctgatgttcctcggtcagttccgcttacagcctaccattaacaccaacaaagatagcgagattgatgcacacaaacaggagtctggtatcgctcctaactttgtacacagccaagacggtaaccaccttcgtatgactgtagtgtgggcacacgagaagtacggaatcgaatcttttgcactgattcacgactccttcggtaccattccggctgacgctgcgaacctgttcaaagcagtgcgcgaaactttcgttgacacatatgagtcttgtgatgtactggctgatttctacgaccagttcgctgaccagttgcacgagtctcaacgcgacaaaatgccagcacttccggctaaaggtaacttgaacctccgtgacatcttaaaatcggacttcgcgttcgcg

SEQ ID NO: 1470 - protein, 890 aa, synthetic construct
  REGION 1..890: note = Variant of RNA polymerase
MHHHHHHMNTINIAKNDFSDIELAAIPFNTLADHYGERLAREQLALEHESYEMGEARFRKMFERQLKAGEVADNAAAKPLITTLLPKMIARINDWFEEVKAKRGKRPTAFQFLQEIKPEAVAYITIKTTLACLTSADNTTVQAVASAIGRAIEDEARFGRIRDLEAKHFKKNVEEQLNKRVGHVYKKAFMQVVEHDMLSKGLLGGEAWSSWHKEDSIHVGVRCIEMLIESTGMVSLHRQNAGVVGQDSETIELAPEYAEAIATRAGALAGISPMFQPCVVPPKPWTGITGGGYWAAGRKPLQLVRTRSLAALRRYEEVSMPEVIKAVNIAQNTAWRINKKVLDVANTITQWQHCPVADVPAMDRGEMPARPLDIDTNEIALTAWKKEASAFYRKDKARVSRRLSMEFMLSQANKFANYEAIWFPQNMDWRGRVYAVPMFNPQGNDMTKGLLTFAQEKPIGEDGFYWLKIHGANTAGVDKVPFPQRIKFVEDNHTNIMECAKAPLENTWWAEQDSPFCFLAFCFEYAGVINSGLSYNCSLPLAFDGSCSGLQHFSAMLRDEIGGKAVNLLPSAEYQDIYRIVSDKVNEMLKQDLINGTSTTVETVTDKKTGEITQRTKYGTKVMAQWWLEHGVNRGVTKRSVMTLVYGSKEFGFRDQVLSDTIQPAIDNGKGDMFLNPNQAAGYMAKLIWNAVSGTVVAAVEAMNWLKSAAKLLAAEVKDPKTDTVLRGRCAVHWVTPDGFPVWQEYKKPIQTRLNLMFLGQFRLQPTINTNKDSEIDAHKQESGIAPNFVHSQDGNHLRMTVVWAHEKYGIESFALIHDSFGTIPADAANLFKAVRETFVDTYESCDVLADFYDQFADQLHESQRDKMPALPAKGNLNLRDILKSDFAFA

SEQ ID NO: 1471 - DNA, 2670 bp, synthetic construct
  misc_feature 1..2670: note = Variant of RNA polymerase
  source 1..2670: mol_type = other DNA
atgcaccatcaccatcaccatatgaacacgattaacattgctaagaacgacttctctgacatcgaactggctgctatcccgttcaacactctggctgaccattacggtgagcgtttagctcgcgaacagttggcccttgagcatgagtcttacgagatgggtgaagcacgcttccgcaagatgtttgagcgtcaacttaaagctggtgaggttgcggataacgctgccgccaagcctctcatcactaccctactccctaagatgattgcacgcatcaacgactggtttgaggaagtgaaagctaagcgcggcaagcgcccgacagccttccagttcctgcaagaaatcaagccggaagccgtagcgtacatcaccattaagaccactctggcttgcctaaccagtgcggacaatacaaccgttcaggctgtagcaagcgcaatcggtcgggccattgaggacgaggctcgcttcggtcgtatccgtgaccttgaagctaagcacttcaagaagaacgttgaggaacaactcaacaagcgcgtagggcacgtctacaagaaagcatttatgcaagttgtcgagcacgacatgctctctaagggtctactcggtggcgaggcgtggtcttcgtggcataaggaagactctattcatgtaggagtacgctgcatcgagatgctcattgagtcaaccggaatggttagcttacaccgccaaaatgctggcgtagtaggtcaagactctgagactatcgaactcgcacctgaatacgctgaggctatcgcaacccgtgcaggtgcgctggctggcatctctccgatgttccaaccttgcgtagttcctcctaagccgtggactggcattactggtggtggctattgggctgcggggcgcaaacccctgcagttagtacgtactcgcagtctggcggcgcttcgccgctatgaagaagtgtcgatgccggaggtcatcaaagcagtcaacattgcgcagaatacagcatggcgtattaacaagaaagttctcgacgtagcgaataccatcacccaatggcagcactgtccagtcgcggatgtgcctgcgatggatcgtggcgaaatgccagctcgtccgttggacatcgataccaacgagattgcacttaaagcgtggaagaaagaagcttccgcgttctaccgcaaagacaaagcacgcgttagccgtcgtctgtcaatggagtttatgttatctcaggcgaacaagtttgcgaattatgaggcaatctggtttccgcaaaacatggattggcgtgggcgcgtgtacgctgtcccgatgttcaatcctcagggcaacgatatgacgaaaggcctgctgacctttgcgcaggagaaacccattggtgaagacggcttctattggctcaagattcatggcgcaaatacagctggagtggataaagtaccgtttccacaacgcatcaaatttgttgaggataaccatacgaatattatggaatgcgcgaaagcaccgctggaaaacacttggtgggcggaacaggactcgccgttccgctttctggcgttctgctttgagtatgctggcgtcatcaatagtggtctgtcgtacaactgtagcttgcctctggcatttgatggtagttgctccggcctgcaacatttctcagcgatgttacgcgacgaaattggcggcaaagctgtgaatctcctcccatctgcggaataccaggatatttatcgtatcgtcagcgacaaagttaacgagatgctgaaacaagatctgattaacggtacctctaccaccgtggaaacggtgactgataagaagacaggcgaaattacccaacgcacgaaatacgggaccaaagttatggcacagtggtggttagaacacggtgtgaatcgtggcgtcacgaaacgctcggttatgactttggtgtatgggagcaaagagtttggattccgcgatcaagtgctgagtgacaccattcaacctgcgatcgataacggcaaaggtgacatgtttctgaatccgaatcaggctgctggttacatggcgaaactgatctggaacgcagtgtccgggaccgtagtcgcagcagttgaggcgatgaactggctgaaaagtgcggcgaaattacttgctgctgaagtgaaggatcctaagacggatacagttctgcgtggccgctgcgcagtacattgggtgactcccgacggcttccctgtgtggcaggaatacaagaagcctattcagacgcgcttgaacctgatgttcctcggtcagttccgcttacagcctaccattaacaccaacaaagatagcgagattgatgcacacaaacaggagtctggtatcgctcctaactttgtacacagccaagacggtaaccaccttcgtatgactgtagtgtgggcacacgagaagtacggaatcgaatcttttgcactgattcacgactccttcggtaccattccggctgacgctgcgaacctgttcaaagcagtgcgcgaaactttcgttgacacatatgagtcttgtgatgtactggctgatttctacgaccagttcgctgaccagttgcacgagtctcaacgcgacaaaatgccagcacttccggctaaaggtaacttgaacctccgtgacatcttaaaatcggacttcgcgttcgcg

SEQ ID NO: 1472 - protein, 890 aa, synthetic construct; identical to SEQ ID NO: 1088
  REGION 1..890: note = Variant of RNA polymerase

SEQ ID NO: 1473 - DNA, 2670 bp, synthetic construct
  misc_feature 1..2670: note = Variant of RNA polymerase
  source 1..2670: mol_type = other DNA
atgcaccatcaccatcaccatatgaacacgattaacattgctaagaacgacttctctgacatcgaactggctgctatcccgttcaacactctggctgaccattacggtgagcgtttagctcgcgaacagttggcccttgagcatgagtcttacgagatgggtgaagcacgcttccgcaagatgtttgagcgtcaacttaaagctggtgaggttgcggataacgctgccgccaagcctctcatcactaccctactccctaagatgattgcacgcatcaacgactggtttgaggaagtgaaagctaagcgcggcaagcgcccgacagccttccagttcctgcaagaaatcaagccggaagccgtagcgtacatcaccattaagaccactctggcttgcctaaccagtgcggacaatacaaccgttcaggctgtagcaagcgcaatcggtcgggccattgaggacgaggctcgcttcggtcgtatccgtgaccttgaagctaagcacttcaagaagaacgttgaggaacaactcaacaagcgcgtagggcacgtctacaagaaagcatttatgcaagttgtcgagcacgacatgctctctaagggtctactcggtggcgaggcgtggtcttcgtggcataaggaagactctattcatgtaggagtacgctgcatcgagatgctcattgagtcaaccggaatggttagcttacaccgccaaaatgctggcgtagtaggtcaagactctgagactatcgaactcgcacctgaatacgctgaggctatcgcaacccgtgcaggtgcgctggctggcatctctccgatgttccaaccttgcgtagttcctcctaagccgtggactggcattactggtggtggctattgggctgcggggcgcaaacccctgcagttagtacgtactcgcagtctggcggcgcttcgccgctatgaagaagtgtcgatgccggaggtcatcaaagcagtcaacattgcgcagaatacagcatggcgtattaacaagaaagttctcgacgtagcgaataccatcacccaatggcagcactgtccagtcgcggatgtgcctgcgatggatcgtggcgaaatgccagctcgtccgttggacatcgataccaacgagattgcacttaaagcgtggaagaaagaagcttccgcgttctaccgcaaagacaaagcacgcgttagccgtcgtctgtcaatggagtttatgttatctcaggcgaacaagtttgcgaattatgaggcaatctggtttccgcaaaacatggattggcgtgggcgcgtgtacgctgtcccgatgttcaatcctcagggcaacgatatgacgaaaggcctgctgacctttgcgcaggagaaacccattggtgaagacggcttctattggctcaagattcatggcgcaaatacagctggagtggataaagtaccgtttccacaacgcatcaaatttgttgaggataaccatacgaatattatggaatgcgcgaaagcaccgctggaaaacacttggtgggcggaacaggactcgccgttctgttttctggcgttctgctttgagtatgctggcgtcatcaatagtggtctgtcgtacaactgtagcttgcctctggcatttgatggtagttgctccggcctgcaacatttctcagcgatgttacgcgacgaaattggcggcaaagctgtgaatctcctcccatctgcggaataccaggatatttatgggatcgtcagcgacaaagttaacgagatgctgaaacaagatctgattaacggtacctctaccaccgtggaaacggtgactgataagaagacaggcgaaattacccaacgcacgaaatacgggaccaaagttatggcacagtggtggttagaacacggtgtgaatcgtggcgtcacgaaacgctcggttatgactttggtgtatgggagcaaagagtttggattccgcgatcaagtgctgagtgacaccattcaaccggcgatcgataacggcaaaggtgacatgtttctgaatccgaatcaggctgctggttacatggcgaaactgatctggaacgcagtgtccgggaccgtagtcgcagcagttgaggcgatgaactggctgaaaagtgcggcgaaattacttgctgctgaagtgaaggatcctaagacggatacagttctgcgtggccgctgcgcagtacattgggtgactcccgacggcttccctgtgtggcaggaatacaagaagcctattcagacgcgcttgaacctgatgttcctcggtcagttccgcttacagcctaccattaacaccaacaaagatagcgagattgatgcacacaaacaggagtctggtatcgctcctaactttgtacacagccaagacggtaaccaccttcgtatgactgtagtgtgggcacacgagaagtacggaatcgaatcttttgcactgattcacgactccttcggtaccattccggctgacgctgcgaacctgttcaaagcagtgcgcgaaactttcgttgacacatatgagtcttgtgatgtactggctgatttctacgaccagttcgctgaccagttgcacgagtctcaacgcgacaaaatgccagcacttccggctaaaggtaacttgaacctccgtgacatcttaaaatcggacttcgcgttcgcg

SEQ ID NO: 1474 - protein, 890 aa, synthetic construct
  REGION 1..890: note = Variant of RNA polymerase
MHHHHHHMNTINIAKNDFSDIELAAIPFNTLADHYGERLAREQLALEHESYEMGEARFRKMFERQLKAGEVADNAAAKPLITTLLPKMIARINDWFEEVKAKRGKRPTAFQFLQEIKPEAVAYITIKTTLACLTSADNTTVQAVASAIGRAIEDEARFGRIRDLEAKHFKKNVEEQLNKRVGHVYKKAFMQVVEHDMLSKGLLGGEAWSSWHKEDSIHVGVRCIEMLIESTGMVSLHRQNAGVVGQDSETIELAPEYAEAIATRAGALAGISPMFQPCVVPPKPWTGITGGGYWAAGRKPLQLVRTRSLAALRRYEEVSMPEVIKAVNIAQNTAWRINKKVLDVANTITQWQHCPVADVPAMDRGEMPARPLDIDTNEIALKAWKKEASAFYRKDKARVSRRLSMEFMLSQANKFANYEAIWFPQNMDWRGRVYAVPMFNPQGNDMTKGLLTFAQEKPIGEDGFYWLKIHGANTAGVDKVPFPQRIKFVEDNHTNIMECAKAPLENTWWAEQDSPFCFLAFCFEYAGVINSGLSYNCSLPLAFDGSCSGLQHFSAMLRDEIGGKAVNLLPSAEYQDIYGIVSDKVNEMLKQDLINGTSTTVETVTDKKTGEITQRTKYGTKVMAQWWLEHGVNRGVTKRSVMTLVYGSKEFGFRDQVLSDTIQPAIDNGKGDMFLNPNQAAGYMAKLIWNAVSGTVVAAVEAMNWLKSAAKLLAAEVKDPKTDTVLRGRCAVHWVTPDGFPVWQEYKKPIQTRLNLMFLGQFRLQPTINTNKDSEIDAHKQESGIAPNFVHSQDGNHLRMTVVWAHEKYGIESFALIHDSFGTIPADAANLFKAVRETFVDTYESCDVLADFYDQFADQLHESQRDKMPALPAKGNLNLRDILKSDFAFA

SEQ ID NO: 1475 - DNA, 2670 bp, synthetic construct
  misc_feature 1..2670: note = Variant of RNA polymerase
  source 1..2670: mol_type = other DNA
atgcaccatcaccatcaccatatgaacacgattaacattgctaagaacgacttctctgacatcgaactggctgctatcccgttcaacactctggctgaccattacggtgagcgtttagctcgcgaacagttggcccttgagcatgagtcttacgagatgggtgaagcacgcttccgcaagatgtttgagcgtcaacttaaagctggtgaggttgcggataacgctgccgccaagcctctcatcactaccctactccctaagatgattgcacgcatcaacgactggtttgaggaagtgaaagctaagcgcggcaagcgcccgacagccttccagttcctgcaagaaatcaagccggaagccgtagcgtacatcaccattaagaccactctggcttgcctaaccagtgcggacaatacaaccgttcaggctgtagcaagcgcaatcggtcgggccattgaggacgaggctcgcttcggtcgtatccgtgaccttgaagctaagcacttcaagaagaacgttgaggaacaactcaacaagcgcgtagggcacgtctacaagaaagcatttatgcaagttgtcgagcacgacatgctctctaagggtctactcggtggcgaggcgtggtcttcgtggcataaggaagactctattcatgtaggagtacgctgcatcgagatgctcattgagtcaaccggaatggttagcttacaccgccaaaatgctggcgtagtaggtcaagactctgagactatcgaactcgcacctgaatacgctgaggctatcgcaacccgtgcaggtgcgctggctggcatctctccgatgttccaaccttgcgtagttcctcctaagccgtggactggcattactggtggtggctattgggctgcggggcgcaaacccctgcagttagtacgtactcgcagtctggcggcgcttcgccgctatgaagaagtgtcgatgccggaggtcatcaaagcagtcaacattgcgcagaatacagcatggcgtattaacaagaaagttctcgacgtagcgaataccatcacccaatggcagcactgtccagtcgcggatgtgcctgcgatggatcgtggcgaaatgccagctcgtccgttggacatcgataccaacgagattgcacttaaagcgtggaagaaagaagcttccgcgttctaccgcaaagacaaagcacgcgttagccgtcgtctgtcaatggagtttatgttatctcaggcgaacaagtttgcgaattatgaggcaatctggtttccgcaaaacatggattggcgtgggcgcgtgtacgctgtcccgatgttcaatcctcagggcaacgatatgacgaaaggcctgctgacctttgcgcaggagaaacccattggtgaagacggcttctattggctcaagattcatggcgcaaatacagctggagtggataaagtaccgtttccacaacgcatcaaatttgttgaggataaccatacgaatattatggaatgcgcgaaagcaccgctggaaaacacttggtgggcggaacaggactcgccgttctgttttctggcgttctgctttgagtatgctggcgtcatcaatagtggtctgtcgtacaactgtagcttgcctctggcatttgatggtagttgctccggcctgcaacatttctcagcgatgttacgcgacgaaattggcggcaaagctgtgaatctcctcccatctgcggaataccaggatatttatcgtatcgtcagcgacaaagttaacgagatgctgaaacaagatctgattaacggtacctctaccaccgtggaaacggtgactgataagaagacaggcgaaattacccaacgcacgaaactggggaccaaagttatggcacagtggtggttagaacacggtgtgaatcgtggcgtcacgaaacgctcggttatgactttggtgtatgggagcaaagagtttggattccgcgatcaagtgctgagtgacaccattcaaccggcgatcgataacggcaaaggtgacatgtttctgaatccgaatcaggctgctggttacatggcgaaactgatctggaacgcagtgtccgggaccgtagtcgcagcagttgaggcgatgaactggctgaaaagtgcggcgaaattacttgctgctgaagtgaaggatcctaagacggatacagttctgcgtggccgctgcgcagtacattgggtgactcccgacggcttccctgtgtggcaggaatacaagaagcctattcagacgcgcttgaacctgatgttcctcggtcagttccgcttacagcctaccattaacaccaacaaagatagcgagattgatgcacacaaacaggagtctggtatcgctcctaactttgtacacagccaagacggtaaccaccttcgtatgactgtagtgtgggcacacgagaagtacggaatcgaatcttttgcactgattcacgactccttcggtaccattccggctgacgctgcgaacctgttcaaagcagtgcgcgaaactttcgttgacacatatgagtcttgtgatgtactggctgatttctacgaccagttcgctgaccagttgcacgagtctcaacgcgacaaaatgccagcacttccggctaaaggtaacttgaacctccgtgacatcttaaaatcggacttcgcgttcgcg

SEQ ID NO: 1476 - protein, 890 aa, synthetic construct
  REGION 1..890: note = Variant of RNA polymerase
MHHHHHHMNTINIAKNDFSDIELAAIPFNTLADHYGERLAREQLALEHESYEMGEARFRKMFERQLKAGEVADNAAAKPLITTLLPKMIARINDWFEEVKAKRGKRPTAFQFLQEIKPEAVAYITIKTTLACLTSADNTTVQAVASAIGRAIEDEARFGRIRDLEAKHFKKNVEEQLNKRVGHVYKKAFMQVVEHDMLSKGLLGGEAWSSWHKEDSIHVGVRCIEMLIESTGMVSLHRQNAGVVGQDSETIELAPEYAEAIATRAGALAGISPMFQPCVVPPKPWTGITGGGYWAAGRKPLQLVRTRSLAALRRYEEVSMPEVIKAVNIAQNTAWRINKKVLDVANTITQWQHCPVADVPAMDRGEMPARPLDIDTNEIALKAWKKEASAFYRKDKARVSRRLSMEFMLSQANKFANYEAIWFPQNMDWRGRVYAVPMFNPQGNDMTKGLLTFAQEKPIGEDGFYWLKIHGANTAGVDKVPFPQRIKFVEDNHTNIMECAKAPLENTWWAEQDSPFCFLAFCFEYAGVINSGLSYNCSLPLAFDGSCSGLQHFSAMLRDEIGGKAVNLLPSAEYQDIYRIVSDKVNEMLKQDLINGTSTTVETVTDKKTGEITQRTKLGTKVMAQWWLEHGVNRGVTKRSVMTLVYGSKEFGFRDQVLSDTIQPAIDNGKGDMFLNPNQAAGYMAKLIWNAVSGTVVAAVEAMNWLKSAAKLLAAEVKDPKTDTVLRGRCAVHWVTPDGFPVWQEYKKPIQTRLNLMFLGQFRLQPTINTNKDSEIDAHKQESGIAPNFVHSQDGNHLRMTVVWAHEKYGIESFALIHDSFGTIPADAANLFKAVRETFVDTYESCDVLADFYDQFADQLHESQRDKMPALPAKGNLNLRDILKSDFAFA

SEQ ID NO: 1477 - DNA, 2670 bp, synthetic construct
  misc_feature 1..2670: note = Variant of RNA polymerase
  source 1..2670: mol_type = other DNA
atgcaccatcaccatcaccatatgaacacgattaacattgctaagaacgacttctctgacatcgaactggctgctatcccgttcaacactctggctgaccattacggtgagcgtttagctcgcgaacagttggcccttgagcatgagtcttacgagatgggtgaagcacgcttccgcaagatgtttgagcgtcaacttaaagctggtgaggttgcggataacgctgccgccaagcctctcatcactaccctactccctaagatgattgcacgcatcaacgactggtttgaggaagtgaaagctaagcgcggcaagcgcccgacagccttccagttcctgcaagaaatcaagccggaagccgtagcgtacatcaccattaagaccactctggcttgcctaaccagtgcggacaatacaaccgttcaggctgtagcaagcgcaatcggtcgggccattgaggacgaggctcgcttcggtcgtatccgtgaccttgaagctaagcacttcaagaagaacgttgaggaacaactcaacaagcgcgtagggcacgtctacaagaaagcatttatgcaagttgtcgagcacgacatgctctctaagggtctactcggtggcgaggcgtggtcttcgtggcataaggaagactctattcatgtaggagtacgctgcatcgagatgctcattgagtcaaccggaatggttagcttacaccgccaaaatgctggcgtagtaggtcaagactctgagactatcgaactcgcacctgaatacgctgaggctatcgcaacccgtgcaggtgcgctggctggcatctctccgatgttccaaccttgcgtagttcctcctaagccgtggactggcattactggtggtggctattgggctgcggggcgcaaacccctgcagttagtacgtactcgcagtctggcggcgcttcgccgctatgaagaagtgtcgatgccggaggtcatcaaagcagtcaacattgcgcagaatacagcatggcgtattaacaagaaagttctcgacgtagcgaataccatcacccaatggcagcactgtccagtcgcggatgtgcctgcgatggatcgtggcgaaatgccagctcgtccgttggacatcgataccaacgagattgcacttaaagcgtggaagaaagaagcttccgcgttctaccgcaaagacaaagcacgcgttagccgtcgtctgtcaatggagtttatgttatctcaggcgaacaagtttgcgaattatgaggcaatctggtttccgcaaaacatggattggcgtgggcgcgtgtacgctgtcccgatgttcaatcctcagggcaacgatatgacgaaaggcctgctgacctttgcgcaggagaaacccattggtgaagacggcttctattggctcaagattcatggcgcaaatacagctggagtggataaagtaccgtttccacaacgcatcaaatttgttgaggataaccatacgaatattatggaatgcgcgaaagcaccgctggaaaacacttggtgggcggaacaggactcgccgttcggctttctggcgttctgctttgagtatgctggcgtcatcaatagtggtctgtcgtacaactgtagcttgcctctggcatttgatggtagttgctccggcctgcaacatttctcagcgatgttacgcgacgaaattggcggcaaagctgtgaatctcctcccatctgcggaataccaggatatttatcgtatcgtcagcgacaaagttaacgagatgctgaaacaagatctgattaacggtacctctaccaccgtggaaacggtgactgataagaagacaggcgaaattacccaacgcacgaaatacgggaccaaagttatggcacagtggtggttagaacacggtgtgaatcgtggcgtcacgaaacgctcggttatgactttggtgtatgggagcaaagagtttggattccgcgatcaagtgctgagtgacaccattcaaccggcgatcgataacggcaaaggtgacatgtttctgaatccgaatcaggctgctggttacatggcgaaactgatctggaacgcagtgtccgggaccgtagtcgcagcagttgaggcgatgaactggctgaaaagtgcggcgaaattacttgctgctgaagtgaaggatcctaagacggatacagttctgcgtggccgctgcgcagtacattgggtgactcccgacggcttccctgtgtggcaggaatacaagaagcctattcagacgcgcttgaacctgatgttcctcggtcagttccgcttacagcctaccattaacaccaacaaagatagcgagattgatgcacacaaacaggagtctggtatcgctcctaactttgtacacagccaagacggtaaccaccttcgtatgactgtagtgtgggcacacgagaagtacggaatcgaatcttttgcactgattcacgactccttcggtaccattccggctgacgctgcgaacctgttcaaagcagtgcgcgaaactttcgttgacacatatgagtcttgtgatgtactggctgatttctacgaccagttcgctgaccagttgcacgagtctcaacgcgacaaaatgccagcacttccggctaaaggtaacttgaacctccgtgacatcttaaaatcggacttcgcgttcgcg

SEQ ID NO: 1478 - protein, 890 aa, synthetic construct
  REGION 1..890: note = Variant of RNA polymerase
MHHHHHHMNTINIAKNDFSDIELAAIPFNTLADHYGERLAREQLALEHESYEMGEARFRKMFERQLKAGEVADNAAAKPLITTLLPKMIARINDWFEEVKAKRGKRPTAFQFLQEIKPEAVAYITIKTTLACLTSADNTTVQAVASAIGRAIEDEARFGRIRDLEAKHFKKNVEEQLNKRVGHVYKKAFMQVVEHDMLSKGLLGGEAWSSWHKEDSIHVGVRCIEMLIESTGMVSLHRQNAGVVGQDSETIELAPEYAEAIATRAGALAGISPMFQPCVVPPKPWTGITGGGYWAAGRKPLQLVRTRSLAALRRYEEVSMPEVIKAVNIAQNTAWRINKKVLDVANTITQWQHCPVADVPAMDRGEMPARPLDIDTNEIALKAWKKEASAFYRKDKARVSRRLSMEFMLSQANKFANYEAIWFPQNMDWRGRVYAVPMFNPQGNDMTKGLLTFAQEKPIGEDGFYWLKIHGANTAGVDKVPFPQRIKFVEDNHTNIMECAKAPLENTWWAEQDSPFGFLAFCFEYAGVINSGLSYNCSLPLAFDGSCSGLQHFSAMLRDEIGGKAVNLLPSAEYQDIYRIVSDKVNEMLKQDLINGTSTTVETVTDKKTGEITQRTKYGTKVMAQWWLEHGVNRGVTKRSVMTLVYGSKEFGFRDQVLSDTIQPAIDNGKGDMFLNPNQAAGYMAKLIWNAVSGTVVAAVEAMNWLKSAAKLLAAEVKDPKTDTVLRGRCAVHWVTPDGFPVWQEYKKPIQTRLNLMFLGQFRLQPTINTNKDSEIDAHKQESGIAPNFVHSQDGNHLRMTVVWAHEKYGIESFALIHDSFGTIPADAANLFKAVRETFVDTYESCDVLADFYDQFADQLHESQRDKMPALPAKGNLNLRDILKSDFAFA

SEQ ID NO: 1479 - DNA, 2670 bp, synthetic construct
  misc_feature 1..2670: note = Variant of RNA polymerase
  source 1..2670: mol_type = other DNA
atgcaccatcaccatcaccatatgaacacgattaacattgctaagaacgacttctctgacatcgaactggctgctatcccgttcaacactctggctgaccattacggtgagcgtttagctcgcgaacagttggcccttgagcatgagtcttacgagatgggtgaagcacgcttccgcaagatgtttgagcgtcaacttaaagctggtgaggttgcggataacgctgccgccaagcctctcatcactaccctactccctaagatgattgcacgcatcaacgactggtttgaggaagtgaaagctaagcgcggcaagcgcccgacagccttccagttcctgcaagaaatcaagccggaagccgtagcgtacatcaccattaagaccactctggcttgcctaaccagtgcggacaatacaaccgttcaggctgtagcaagcgcaatcggtcgggccattgaggacgaggctcgcttcggtcgtatccgtgaccttgaagctaagcacttcaagaagaacgttgaggaacaactcaacaagcgcgtagggcacgtctacaagaaagcatttatgcaagttgtcgagcacgacatgctctctaagggtctactcggtggcgaggcgtggtcttcgtggcataaggaagactctattcatgtaggagtacgctgcatcgagatgctcattgagtcaaccggaatggttagcttacaccgccaaaatgctggcgtagtaggtcaagactctgagactatcgaactcgcacctgaatacgctgaggctatcgcaacccgtgcaggtgcgctggctggcatctctccgatgttccaaccttgcgtagttcctcctaagccgtggactggcattactggtggtggctattgggctgcggggcgcaaacccctgcagttagtacgtactcgcagtctggcggcgcttcgccgctatgaagaagtgtcgatgccggaggtcatcaaagcagtcaacattgcgcagaatacagcatggcgtattaacaagaaagttctcgacgtagcgaataccatcacccaatggcagcactgtccagtcgcggatgtgcctgcgatggatcgtggcgaaatgccagctcgtccgttggacatcgataccaacgagattgcacttaaagcgtggaagaaagaagcttccgcgttctaccgcaaagacaaagcacgcgttagccgtcgtctgtcaatggagtttatgttatctcaggcgaacaagtttgcgaattatgaggcaatctggtttccgcaaaacatggattggcgtgggcgcgtgtacgctgtcccgatgttcaatcctcagggcaacgatatgacgaaaggcctgctgacctttgcgcaggagaaacccattggtgaagacggcttctattggctcaagattcatggcgcaaatacagctggagtggataaagtaccgtttccacaacgcatcaaatttgttgaggataaccatacgaatattatggaatgcgcgaaagcaccgctggaaaacacttggtgggcggaacaggacctgccgttctgttttctggcgttctgctttgagtatgctggcgtcatcaatagtggtctgtcgtacaactgtagcttgcctctggcatttgatggtagttgctccggcctgcaacatttctcagcgatgttacgcgacgaaattggcggcaaagctgtgaatctcctcccatctgcggaataccaggatatttatcgtatcgtcagcgacaaagttaacgagatgctgaaacaagatctgattaacggtacctctaccaccgtggaaacggtgactgataagaagacaggcgaaattacccaacgcacgaaatacgggaccaaagttatggcacagtggtggttagaacacggtgtgaatcgtggcgtcacgaaacgctcggttatgactttggtgtatgggagcaaagagtttggattccgcgatcaagtgctgagtgacaccattcaaccggcgatcgataacggcaaaggtgacatgtttctgaatccgaatcaggctgctggttacatggcgaaactgatctggaacgcagtgtccgggaccgtagtcgcagcagttgaggcgatgaactggctgaaaagtgcggcgaaattacttgctgctgaagtgaaggatcctaagacggatacagttctgcgtggccgctgcgcagtacattgggtgactcccgacggcttccctgtgtggcaggaatacaagaagcctattcagacgcgcttgaacctgatgttcctcggtcagttccgcttacagcctaccattaacaccaacaaagatagcgagattgatgcacacaaacaggagtctggtatcgctcctaactttgtacacagccaagacggtaaccaccttcgtatgactgtagtgtgggcacacgagaagtacggaatcgaatcttttgcactgattcacgactccttcggtaccattccggctgacgctgcgaacctgttcaaagcagtgcgcgaaactttcgttgacacatatgagtcttgtgatgtactggctgatttctacgaccagttcgctgaccagttgcacgagtctcaacgcgacaaaatgccagcacttccggctaaaggtaacttgaacctccgtgacatcttaaaatcggacttcgcgttcgcg

SEQ ID NO: 1480 - protein, 890 aa, synthetic construct
  REGION 1..890: note = Variant of RNA polymerase
MHHHHHHMNTINIAKNDFSDIELAAIPFNTLADHYGERLAREQLALEHESYEMGEARFRKMFERQLKAGEVADNAAAKPLITTLLPKMIARINDWFEEVKAKRGKRPTAFQFLQEIKPEAVAYITIKTTLACLTSADNTTVQAVASAIGRAIEDEARFGRIRDLEAKHFKKNVEEQLNKRVGHVYKKAFMQVVEHDMLSKGLLGGEAWSSWHKEDSIHVGVRCIEMLIESTGMVSLHRQNAGVVGQDSETIELAPEYAEAIATRAGALAGISPMFQPCVVPPKPWTGITGGGYWAAGRKPLQLVRTRSLAALRRYEEVSMPEVIKAVNIAQNTAWRINKKVLDVANTITQWQHCPVADVPAMDRGEMPARPLDIDTNEIALKAWKKEASAFYRKDKARVSRRLSMEFMLSQANKFANYEAIWFPQNMDWRGRVYAVPMFNPQGNDMTKGLLTFAQEKPIGEDGFYWLKIHGANTAGVDKVPFPQRIKFVEDNHTNIMECAKAPLENTWWAEQDLPFCFLAFCFEYAGVINSGLSYNCSLPLAFDGSCSGLQHFSAMLRDEIGGKAVNLLPSAEYQDIYRIVSDKVNEMLKQDLINGTSTTVETVTDKKTGEITQRTKYGTKVMAQWWLEHGVNRGVTKRSVMTLVYGSKEFGFRDQVLSDTIQPAIDNGKGDMFLNPNQAAGYMAKLIWNAVSGTVVAAVEAMNWLKSAAKLLAAEVKDPKTDTVLRGRCAVHWVTPDGFPVWQEYKKPIQTRLNLMFLGQFRLQPTINTNKDSEIDAHKQESGIAPNFVHSQDGNHLRMTVVWAHEKYGIESFALIHDSFGTIPADAANLFKAVRETFVDTYESCDVLADFYDQFADQLHESQRDKMPALPAKGNLNLRDILKSDFAFA

SEQ ID NO: 1481 - DNA, 2670 bp, synthetic construct
  misc_feature 1..2670: note = Variant of RNA polymerase
  source 1..2670: mol_type = other DNA
atgcaccatcaccatcaccatatgaacacgattaacattgctaagaacgacttctctgacatcgaactggctgctatcccgttcaacactctggctgaccattacggtgagcgtttagctcgcgaacagttggcccttgagcatgagtcttacgagatgggtgaagcacgcttccgcaagatgtttgagcgtcaacttaaagctggtgaggttgcggataacgctgccgccaagcctctcatcactaccctactccctaagatgattgcacgcatcaacgactggtttgaggaagtgaaagctaagcgcggcaagcgcccgacagccttccagttcctgcaagaaatcaagccggaagccgtagcgtacatcaccattaagaccactctggcttgcctaaccagtgcggacaatacaaccgttcaggctgtagcaagcgcaatcggtcgggccattgaggacgaggctcgcttcggtcgtatccgtgaccttgaagctaagcacttcaagaagaacgttgaggaacaactcaacaagcgcgtagggcacgtctacaagaaagcatttatgcaagttgtcgagcacgacatgctctctaagggtctactcggtggcgaggcgtggtcttcgtggcataaggaagactctattcatgtaggagtacgctgcatcgagatgctcattgagtcaaccggaatggttagcttacaccgccaaaatgctggcgtagtaggtcaagactctgagactatcgaactcgcacctgaatacgctgaggctatcgcaacccgtgcaggtgcgctggctggcatctctccgatgttccaaccttgcgtagttcctcctaagccgtggactggcattactggtggtggctattgggctgcggggcgcaaacccctgcagttagtacgtactcgcagtctggcggcgcttcgccgctatgaagaagtgtcgatgccggaggtcatcaaagcagtcaacattgcgcagaatacagcatggcgtattaacaagaaagttctcgacgtagcgaataccatcacccaatggcagcactgtccagtcgcggatgtgcctgcgatggatcgtggcgaaatgccagctcgtccgttggacatcgataccaacgagattgcacttaaagcgtggaagaaagaagcttccgcgttctaccgcaaagacaaagcacgcgttagccgtcgtctgtcaatggagtttatgttatctcaggcgaacaagtttgcgaattatgaggcaatctggtttccgcaaaacatggattggcgtgggcgcgtgtacgctgtcccgatgttcaatcctcagggcaacgatatgacgaaaggcctgctgacctttgcgcaggagaaacccattggtgaagacggcttctattggctcaagattcatggcgcaaatacagctggagtggataaagtaccgtttccacaacgcatcaaatttgttgaggataaccatacgaatattatggaatgcgcgaaagcaccgctggaaaacacttggtgggcggaacaggactcgccgttctgttttctggcgttctgctttgagtatgctggcgtcatcaatagtggtctgtcgtacaactgtagcttgcctctggcatttgatggtagttgctccggcctgcaacatttctcagcgatgttacgcgacgaaattggcggcaaagctgtgaatctcctcccatctgcggaataccaggatatttatcgtatcgtcagcgacaaagttaacgagatgctgaaacaagatctgattaacggtacctctaccaccgtggaaacggtgactgatgaaaagacaggcgaaattacccaacgcacgaaatacgggaccaaagttatggcacagtggtggttagaacacggtgtgaatcgtggcgtcacgaaacgctcggttatgactttggtgtatgggagcaaagagtttggattccgcgatcaagtgctgagtgacaccattcaaccggcgatcgataacggcaaaggtgacatgtttctgaatccgaatcaggctgctggttacatggcgaaactgatctggaacgcagtgtccgggaccgtagtcgcagcagttgaggcgatgaactggctgaaaagtgcggcgaaattacttgctgctgaagtgaaggatcctaagacggatacagttctgcgtggccgctgcgcagtacattgggtgactcccgacggcttccctgtgtggcaggaatacaagaagcctattcagacgcgcttgaacctgatgttcctcggtcagttccgcttacagcctaccattaacaccaacaaagatagcgagattgatgcacacaaacaggagtctggtatcgctcctaactttgtacacagccaagacggtaaccaccttcgtatgactgtagtgtgggcacacgagaagtacggaatcgaatcttttgcactgattcacgactccttcggtaccattccggctgacgctgcgaacctgttcaaagcagtgcgcgaaactttcgttgacacatatgagtcttgtgatgtactggctgatttctacgaccagttcgctgaccagttgcacgagtctcaacgcgacaaaatgccagcacttccggctaaaggtaacttgaacctccgtgacatcttaaaatcggacttcgcgttcgcg

SEQ ID NO: 1482 - protein, 890 aa, synthetic construct
  REGION 1..890: note = Variant of RNA polymerase
MHHHHHHMNTINIAKNDFSDIELAAIPFNTLADHYGERLAREQLALEHESYEMGEARFRKMFERQLKAGEVADNAAAKPLITTLLPKMIARINDWFEEVKAKRGKRPTAFQFLQEIKPEAVAYITIKTTLACLTSADNTTVQAVASAIGRAIEDEARFGRIRDLEAKHFKKNVEEQLNKRVGHVYKKAFMQVVEHDMLSKGLLGGEAWSSWHKEDSIHVGVRCIEMLIESTGMVSLHRQNAGVVGQDSETIELAPEYAEAIATRAGALAGISPMFQPCVVPPKPWTGITGGGYWAAGRKPLQLVRTRSLAALRRYEEVSMPEVIKAVNIAQNTAWRINKKVLDVANTITQWQHCPVADVPAMDRGEMPARPLDIDTNEIALKAWKKEASAFYRKDKARVSRRLSMEFMLSQANKFANYEAIWFPQNMDWRGRVYAVPMFNPQGNDMTKGLLTFAQEKPIGEDGFYWLKIHGANTAGVDKVPFPQRIKFVEDNHTNIMECAKAPLENTWWAEQDSPFCFLAFCFEYAGVINSGLSYNCSLPLAFDGSCSGLQHFSAMLRDEIGGKAVNLLPSAEYQDIYRIVSDKVNEMLKQDLINGTSTTVETVTDEKTGEITQRTKYGTKVMAQWWLEHGVNRGVTKRSVMTLVYGSKEFGFRDQVLSDTIQPAIDNGKGDMFLNPNQAAGYMAKLIWNAVSGTVVAAVEAMNWLKSAAKLLAAEVKDPKTDTVLRGRCAVHWVTPDGFPVWQEYKKPIQTRLNLMFLGQFRLQPTINTNKDSEIDAHKQESGIAPNFVHSQDGNHLRMTVVWAHEKYGIESFALIHDSFGTIPADAANLFKAVRETFVDTYESCDVLADFYDQFADQLHESQRDKMPALPAKGNLNLRDILKSDFAFA

SEQ ID NO: 1483 - DNA, 2670 bp, synthetic construct
  misc_feature 1..2670: note = Variant of RNA polymerase
  source 1..2670: mol_type = other DNA
atgcaccatcaccatcaccatatgaacacgattaacattgctaagaacgacttctctgacatcgaactggctgctatcccgttcaacactctggctgaccattacggtgagcgtttagctcgcgaacagttggcccttgagcatgagtcttacgagatgggtgaagcacgcttccgcaagatgtttgagcgtcaacttaaagctggtgaggttgcggataacgctgccgccaagcctctcatcactaccctactccctaagatgattgcacgcatcaacgactggtttgaggaagtgaaagctaagcgcggcaagcgcccgacagccttccagttcctgcaagaaatcaagccggaagccgtagcgtacatcaccattaagaccactctggcttgcctaaccagtgcggacaatacaaccgttcaggctgtagcaagcgcaatcggtcgggccattgaggacgaggctcgcttcggtcgtatccgtgaccttgaagctaagcacttcaagaagaacgttgaggaacaactcaacaagcgcgtagggcacgtctacaagaaagcatttatgcaagttgtcgagcacgacatgctctctaagggtctactcggtggcgaggcgtggtcttcgtggcataaggaagactctattcatgtaggagtacgctgcatcgagatgctcattgagtcaaccggaatggttagcttacaccgccaaaatgctggcgtagtaggtcaagactctgagactatcgaactcgcacctgaatacgctgaggctatcgcaacccgtgcaggtgcgctggctggcatctctccgatgttccaaccttgcgtagttcctcctaagccgtggactggcattactggtggtggctattgggctgcggggcgcaaacccctgcagttagtacgtactcgcagtctggcggcgcttcgccgctatgaagaagtgtcgatgccggaggtcatcaaagcagtcaacattgcgcagaatacagcatggcgtattaacaagaaagttctcgacgtagcgaataccatcacccaatggcagcactgtccagtcgcggatgtgcctgcgatggatcgtggcgaaatgccagctcgtccgttggacatcgataccaacgagattgcacttaaagcgtggaagaaagaagcttccgcgttctaccgcaaagacaaagcacgcgttagccgtcgtctgtcaatggagtttatgttatctcaggcgaacaagtttgcgaattatgaggcaatctggtttccgcaaaacatggattggcgtgggcgcgtgtacgctgtcccgatgttcaatcctcagggcaacgatatgacgaaaggcctgctgacctttgcgcaggagaaacccattggtgaagacggcttctattggctcaagattcatggcgcaaatacagctggagtggataaagtaccgtttccacaacgcatcaaatttgttgaggataaccatacgaatattatggaatgcgcgaaagcaccgctggaaaacacttggtgggcggaacaggactcgccgttctgttttctggcgttctgctttgagtatgctggcgtcatcaatagtggtctgtcgtacaactgtagcttgcctctggcatttgatggtagttgctccggcctgcaacatttctcagcgatgttacgcgacgaaattggcggcaaagctgtgaatctcctcccatctgcggaataccaggatatttatcgtatcgtcagcgacaaagttaacgagatgctgaaacaagatctgattaacggtacctctaccaccgtggaaacggtgactgataagaagacaggcgaaattacccaacgcacgaaatacgggaccaaagttatggcacagtggtggttagaacacggtgtgaatcgtggcgtcacgaaacgctcggttatgactttggtgtatgggagcaaagagtttggattccgcgatcaagtgctgagtgacaccattcaaccggcgatcgataacggcaaaggtgacatgtttctgcaaccgaatcaggctgctggttacatggcgaaactgatctggaacgcagtgtccgggaccgtagtcgcagcagttgaggcgatgaactggctgaaaagtgcggcgaaattacttgctgctgaagtgaaggatcctaagacggatacagttctgcgtggccgctgcgcagtacattgggtgactcccgacggcttccctgtgtggcaggaatacaagaagcctattcagacgcgcttgaacctgatgttcctcggtcagttccgcttacagcctaccattaacaccaacaaagatagcgagattgatgcacacaaacaggagtctggtatcgctcctaactttgtacacagccaagacggtaaccaccttcgtatgactgtagtgtgggcacacgagaagtacggaatcgaatcttttgcactgattcacgactccttcggtaccattccggctgacgctgcgaacctgttcaaagcagtgcgcgaaactttcgttgacacatatgagtcttgtgatgtactggctgatttctacgaccagttcgctgaccagttgcacgagtctcaacgcgacaaaatgccagcacttccggctaaaggtaacttgaacctccgtgacatcttaaaatcggacttcgcgttcgcg

SEQ ID NO: 1484 - protein, 890 aa, synthetic construct
  REGION 1..890: note = Variant of RNA polymerase
MHHHHHHMNTINIAKNDFSDIELAAIPFNTLADHYGERLAREQLALEHESYEMGEARFRKMFERQLKAGEVADNAAAKPLITTLLPKMIARINDWFEEVKAKRGKRPTAFQFLQEIKPEAVAYITIKTTLACLTSADNTTVQAVASAIGRAIEDEARFGRIRDLEAKHFKKNVEEQLNKRVGHVYKKAFMQVVEHDMLSKGLLGGEAWSSWHKEDSIHVGVRCIEMLIESTGMVSLHRQNAGVVGQDSETIELAPEYAEAIATRAGALAGISPMFQPCVVPPKPWTGITGGGYWAAGRKPLQLVRTRSLAALRRYEEVSMPEVIKAVNIAQNTAWRINKKVLDVANTITQWQHCPVADVPAMDRGEMPARPLDIDTNEIALKAWKKEASAFYRKDKARVSRRLSMEFMLSQANKFANYEAIWFPQNMDWRGRVYAVPMFNPQGNDMTKGLLTFAQEKPIGEDGFYWLKIHGANTAGVDKVPFPQRIKFVEDNHTNIMECAKAPLENTWWAEQDSPFCFLAFCFEYAGVINSGLSYNCSLPLAFDGSCSGLQHFSAMLRDEIGGKAVNLLPSAEYQDIYRIVSDKVNEMLKQDLINGTSTTVETVTDKKTGEITQRTKYGTKVMAQWWLEHGVNRGVTKRSVMTLVYGSKEFGFRDQVLSDTIQPAIDNGKGDMFLQPNQAAGYMAKLIWNAVSGTVVAAVEAMNWLKSAAKLLAAEVKDPKTDTVLRGRCAVHWVTPDGFPVWQEYKKPIQTRLNLMFLGQFRLQPTINTNKDSEIDAHKQESGIAPNFVHSQDGNHLRMTVVWAHEKYGIESFALIHDSFGTIPADAANLFKAVRETFVDTYESCDVLADFYDQFADQLHESQRDKMPALPAKGNLNLRDILKSDFAFA

SEQ ID NO: 1485 - DNA, 2670 bp, synthetic construct
  misc_feature 1..2670: note = Variant of RNA polymerase
  source 1..2670: mol_type = other DNA
atgcaccatcaccatcaccatatgaacacgattaacattgctaagaacgacttctctgacatcgaactggctgctatcccgttcaacactctggctgaccattacggtgagcgtttagctcgcgaacagttggcccttgagcatgagtcttacgagatgggtgaagcacgcttccgcaagatgtttgagcgtcaacttaaagctggtgaggttgcggataacgctgccgccaagcctctcatcactaccctactccctaagatgattgcacgcatcaacgactggtttgaggaagtgaaagctaagcgcggcaagcgcccgacagccttccagttcctgcaagaaatcaagccggaagccgtagcgtacatcaccattaagaccactctggcttgcctaaccagtgcggacaatacaaccgttcaggctgtagcaagcgcaatcggtcgggccattgaggacgaggctcgcttcggtcgtatccgtgaccttgaagctaagcacttcaagaagaacgttgaggaacaactcaacaagcgcgtagggcacgtctacaagaaagcatttatgcaagttgtcgagcacgacatgctctctaagggtctactcggtggcgaggcgtggtcttcgtggcataaggaagactctattcatgtaggagtacgctgcatcgagatgctcattgagtcaaccggaatggttagcttacaccgccaaaatgctggcgtagtgggtcaggactctgagactatcgaactcgcacctgaatacgctgaggctatcgcaacccgtgcaggtgcgctggctggcatctctccgatgttccaaccttgcgtagttcctcctaagccgtggactggcattactggtggtggctattgggctgcggggcgcaaacccctgcagttagtacgtactcgcagtctggcggcgcttcgccgctatgaagaagtgtcgatgccggaggtcatcaaagcagtcaacattgcgcagaatacagcatggcgtattaacaagaaagttctcgacgtagcgaataccatcacccaatggcagcactgtccagtcgcggatgtgcctgcgatggatcgtggcgaaatgccagctcgtccgttggacatcgataccaacgagattgcacttaaagcgtggaagaaagaagcttccgcgttctaccgcaaagacaaagcacgcgtgagccgtcgtctgtcgatggagtttatgttatctcaggcgaacaagtttgcgaattatgaggcaatctggtttccgcaaaacatggattggcgtgggcgcgtgtacgctgtcccgatgttcaatcctcagggcaacgatatgacgaaaggcctgctgacctttgcgcaggagaaacccattggtgaagacggcttctattggctcaagattcatggcgcaaatacagctggagtggataaagtaccgtttccacaacgcatcaaatttgttgaggataaccatacgaatattatggaatgcgcgaaagcaccgctggaaaacacttggtgggcggaacaggactcgccgttctgctttctggcgttctgctttgagtatgctggcgtcatcaatagtggtctgtcgtacaactgtagcttgcctctggcatttgatggtagttgctccggcctgcaacatttctcagcgatgttacgcgacgaaattggcggcaaagctgtgaatctcctcccatctgcggaataccaggatatttatcgtatcgtcagcgacaaagttaacgagatgctgaaacaagatctgattaacggtacctctaccaccgtggaaacggtgactgataagaagacaggcgaaattacccaacgcacgaaatacgggaccaaagttatggcacagtggtggttagaacacggtgtgaatcgtggcgtcacgaaacgctcggttatgactttggtgtatgggagcaaagagtttggattccgcgatcaagtgctgagtgacaccattcaaccggcgatcgataacggcaaaggtgacatgtttctgaatccgaatcaggctgctggttacatggcgaaactgatctggaacgcagtgtccgggaccgtagtcgcagcagttgaggcgatgaactggctgaaaagtgcggcgaaattacttgctgctgaagtgaaggatcctaagacggatacagttctgcgtggccgctgcgcagtacattgggtgactcccgacggcttccctgtgtggcaggaatacaagaagcctattcgtacgcgcttgaacctgatgttcctcggtcagttccgcttacagcctaccattaacaccaacaaagatagcgagattgatgcacacaaacaggggtctggtatcgctcctaactttgtacacagccaagacggtaaccaccttcgtatgactgtagtgtgggcacacgagaagtacggaatcgaatcttttgcactgattcacgactccttcggtaccattccggctgacgctgcgaacctgttcaaagcagtgcgcgaaactttcgttgacacatatgagtcttgtgatgtactggctgatttctacgaccagttcgctgaccagttgcacgagtctcaacgcgacaaaatgccagcacttccggctaaaggtaacttgaacctccgtgacatcttaaaatcggacttcgcgttcgcg

SEQ ID NO: 1486 - protein, 890 aa, synthetic construct
  REGION 1..890: note = Variant of RNA polymerase
MHHHHHHMNTINIAKNDFSDIELAAIPFNTLADHYGERLAREQLALEHESYEMGEARFRKMFERQLKAGEVADNAAAKPLITTLLPKMIARINDWFEEVKAKRGKRPTAFQFLQEIKPEAVAYITIKTTLACLTSADNTTVQAVASAIGRAIEDEARFGRIRDLEAKHFKKNVEEQLNKRVGHVYKKAFMQVVEHDMLSKGLLGGEAWSSWHKEDSIHVGVRCIEMLIESTGMVSLHRQNAGVVGQDSETIELAPEYAEAIATRAGALAGISPMFQPCVVPPKPWTGITGGGYWAAGRKPLQLVRTRSLAALRRYEEVSMPEVIKAVNIAQNTAWRINKKVLDVANTITQWQHCPVADVPAMDRGEMPARPLDIDTNEIALKAWKKEASAFYRKDKARVSRRLSMEFMLSQANKFANYEAIWFPQNMDWRGRVYAVPMFNPQGNDMTKGLLTFAQEKPIGEDGFYWLKIHGANTAGVDKVPFPQRIKFVEDNHTNIMECAKAPLENTWWAEQDSPFCFLAFCFEYAGVINSGLSYNCSLPLAFDGSCSGLQHFSAMLRDEIGGKAVNLLPSAEYQDIYRIVSDKVNEMLKQDLINGTSTTVETVTDKKTGEITQRTKYGTKVMAQWWLEHGVNRGVTKRSVMTLVYGSKEFGFRDQVLSDTIQPAIDNGKGDMFLNPNQAAGYMAKLIWNAVSGTVVAAVEAMNWLKSAAKLLAAEVKDPKTDTVLRGRCAVHWVTPDGFPVWQEYKKPIRTRLNLMFLGQFRLQPTINTNKDSEIDAHKQGSGIAPNFVHSQDGNHLRMTVVWAHEKYGIESFALIHDSFGTIPADAANLFKAVRETFVDTYESCDVLADFYDQFADQLHESQRDKMPALPAKGNLNLRDILKSDFAFA

SEQ ID NO: 1487 - DNA, 2670 bp, synthetic construct
  misc_feature 1..2670: note = Variant of RNA polymerase
  source 1..2670: mol_type = other DNA
atgcaccatcaccatcaccatatgaacacgattaacattgctaagaacgacttctctgacatcgaactggctgctatcccgttcaacactctggctgaccattacggtgagcgtttagctcgcgaacagttggcccttgagcatgagtcttacgagatgggtgaagcacgcttccgcaagatgtttgagcgtcaacttaaagctggtgaggttgcggataacgctgccgccaagcctctcatcactaccctactccctaagatgattgcacgcatcaacgactggtttgaggaagtgaaagctaagcgcggcaagcgcccgacagccttccagttcctgcaagaaatcaagccggaagccgtagcgtacatcaccattaagaccactctggcttgcctaaccagtgcggacaatacaaccgttcaggctgtagcaagcgcaatcggtcgggccattgaggacgaggctcgcttcggtcgtatccgtgaccttgaagctaagcacttcaagaagaacgttgaggaacaactcaacaagcgcgtagggcacgtctacaagaaagcatttatgcaagttgtcgagcacgacatgctctctaagggtctactcggtggcgaggcgtggtcttcgtggcataaggaagactctattcatgtaggagtacgctgcatcgagatgctcattgagtcaaccggaatggttagcttacaccgccaaaatgctggcgtagtaggtcaagactctgagactatcgaactcgcacctgaatacgctgaggctatcgcaacccgtgcaggtgcgctggctggcatctctccgatgttccaaccttgcgtagttcctcctaagccgtggactggcattactggtggtggctattgggctgcggggcgcaaacccctgcagttagtacgtactcgcagtctggcggcgcttcgccgctatgaagaagtgtcgatgccggaggtcatcaaagcagtcaacattgcgcagaatacagcatggcgtattaacaagaaagttctcgacgtagcgaataccatcacccaatggcagcactgtccagtcgcggatgtgcctgcgatggatcgtggcgaaatgccagctcgtccgttggacatcgataccaacgagattgcacttaaagcgtggaagaaagaagcttccgcgttctaccgcaaagacaaagcacgcgttagccgtcgtctgtcaatggagtttatgttatctcaggcgaacaagtttgcgaattatgaggcaatctggtttccgcaaaacatggattggcgtgggcgcgtgtacgctgtcccgatgttcaatcctcagggcaacgatatgacgaaaggcctgctgacctttgcgcaggagaaacccattggtgaagacggcttctattggctcaagattcatggcgcaaatacagctggagtggataaagtaccgtttccacaacgcatcaaatttgttgaggataaccatacgaatattatggaatgcgcgaaagcaccgctggaaaacacttggtgggcggaacaggactcgccgttctgctttctggcgttctgctttgagtatgctggcgtcatcaatagtggtctgtcgtacaactgtagcttgcctctggcatttgatggtagttgctccggcctgcaacatttctcagcgatgttacgcgacgaaattggcggcaaagctgtgaatctcctcccatctgcggaataccaggatatttatcgtatcgtcagcgacaaagttaacgagatgctgaaacaagatctgattaacggtacctctaccaccgtggaaacggtgactgataaaaagacaggcgaaattacccaacgcacgaaatacgggaccaaagttatggcacagtggtggttagaacacggtgtgaatcgtggcgtcacgaaacgctcggttatgactttggtgtatgggagcaaagagtttggattccgcgatcaagtgctgagtgacaccattcaacgtgcgatcgataacggcaaaggtgacatgtttctgaatccgaatcaggctgctggttacatggcgaaactgatctggaacgcagtgtccgggaccgtagtcgcagcagttgaggcgatgaactggctgaaaagtgcggcgaaattacttgctgctgaagtgaaggatcctaagacggatacagttctgcgtggccgctgcgcagtacattgggtgactcccgacggcttccctgtgtggcaggaatacaagaagcctattcagacgcgcttgaacctgatgttcctcggtcagttccgcttacagcctaccattaacaccaacaaagatagcgagattgatgcacacaaacaggagtctggtatcgctcctaactttgtacacagccaagacggtaaccaccttcgtatgactgtagtgtgggcacacgagaagtacggaatcgaatcttttgcactgattcacgactccttcggtaccattccggctgacgctgcgaacctgttcaaagcagtgcgcgaaactttcgttgacacatatgagtcttgtgatgtactggctgatttctacgaccagtttgctgaccagttgcacgagtctcaacgcgacaaaatgccagcacttccggctaaaggtaacttgaacctccgtgacatcttaaaatcggacttcgcgttcgcg

SEQ ID NO: 1488 - protein, 890 aa, synthetic construct
  REGION 1..890: note = Variant of RNA polymerase
MHHHHHHMNTINIAKNDFSDIELAAIPFNTLADHYGERLAREQLALEHESYEMGEARFRKMFERQLKAGEVADNAAAKPLITTLLPKMIARINDWFEEVKAKRGKRPTAFQFLQEIKPEAVAYITIKTTLACLTSADNTTVQAVASAIGRAIEDEARFGRIRDLEAKHFKKNVEEQLNKRVGHVYKKAFMQVVEHDMLSKGLLGGEAWSSWHKEDSIHVGVRCIEMLIESTGMVSLHRQNAGVVGQDSETIELAPEYAEAIATRAGALAGISPMFQPCVVPPKPWTGITGGGYWAAGRKPLQLVRTRSLAALRRYEEVSMPEVIKAVNIAQNTAWRINKKVLDVANTITQWQHCPVADVPAMDRGEMPARPLDIDTNEIALKAWKKEASAFYRKDKARVSRRLSMEFMLSQANKFANYEAIWFPQNMDWRGRVYAVPMFNPQGNDMTKGLLTFAQEKPIGEDGFYWLKIHGANTAGVDKVPFPQRIKFVEDNHTNIMECAKAPLENTWWAEQDSPFCFLAFCFEYAGVINSGLSYNCSLPLAFDGSCSGLQHFSAMLRDEIGGKAVNLLPSAEYQDIYRIVSDKVNEMLKQDLINGTSTTVETVTDKKTGEITQRTKYGTKVMAQWWLEHGVNRGVTKRSVMTLVYGSKEFGFRDQVLSDTIQRAIDNGKGDMFLNPNQAAGYMAKLIWNAVSGTVVAAVEAMNWLKSAAKLLAAEVKDPKTDTVLRGRCAVHWVTPDGFPVWQEYKKPIQTRLNLMFLGQFRLQPTINTNKDSEIDAHKQESGIAPNFVHSQDGNHLRMTVVWAHEKYGIESFALIHDSFGTIPADAANLFKAVRETFVDTYESCDVLADFYDQFADQLHESQRDKMPALPAKGNLNLRDILKSDFAFA

SEQ ID NO: 1489 - DNA, 2670 bp, synthetic construct; identical to SEQ ID NO: 1103
  misc_feature 1..2670: note = Variant of RNA polymerase
  source 1..2670: mol_type = other DNA

SEQ ID NO: 1490 - protein, 890 aa, synthetic construct; identical to SEQ ID NO: 1104
  REGION 1..890: note = Variant of RNA polymerase

SEQ ID NO: 1491 - DNA, 2670 bp, synthetic construct
  misc_feature 1..2670: note = Variant of RNA polymerase
  source 1..2670: mol_type = other DNA
atgcaccatcaccatcaccatatgaacacgattaacattgctaagaacgacttctctgacatcgaactggctgctatcccgttcaacactctggctgaccattacggtgagcgtttagctcgcgaacagttggcccttgagcatgagtcttacgagatgggtgaagcacgcttccgcaagatgtttgagcgtcaacttaaagctggtgaggttgcggataacgctgccgccaagcctctcatcactaccctactccctaagatgattgcacgcatcaacgactggtttgaggaagtgaaagctaagcgcggcaagcgcccgacagccttccagttcctgcaagaaatcaagccggaagccgtagcgtacatcaccattaagaccactctggcttgcctaaccagtgcggacaatacaaccgttcaggctgtagcaagcgcaatcggtcgggccattgaggacgaggctcgcttcggtcgtatccgtgaccttgaagctaagcacttcaagaagaacgttgaggaacaactcaacaagcgcgtagggcacgtctacaagaaagcatttatgcaagttgtcgagcacgacatgctctctaagggtctactcggtggcgaggcgtggtcttcgtggcataaggaagactctattcatgtaggagtacgctgcatcgagatgctcattgagtcaaccggaatggttagcttacaccgccaaaatgctggcgtagtaggtcaagactctgagactatcgaactcgcacctgaatacgctgaggctatcgcaacccgtgcaggtgcgctggctggcatctctccgatgttccaaccttgcgtagttcctcctaagccgtggactggcattactggtggtggctattgggctgcggggcgcaaacccctgcagttagtacgtactcgcagtctggcggcgcttcgccgctatgaagaagtgtcgatgccggaggtcatcaaagcagtcaacattgcgcagaatacagcatggcgtattaacaagaaagttctcgacgtagcgaataccatcacccaatggcagcactgtccagtcgcggatgtgcctgcgatggatcgtggcgaaatgccagctcgtccgttggacatcgataccaacgagattgcacttaaagcgtggaagaaagaagcttccgcgttctaccgcaaagacaaagcacgcgttagccgtcgtctgtcaatggagtttatgttagagcaggcgaacaagtttgcgaattatgaggcaatctggtttccgcaaaacatggattggcgtgggcgcgtgtacgctgtcccgatgttcaatcctcagggcaacgatatgacgaaaggcctgctgacctttgcgcaggagaaacccattggtgaagacggcttctattggctcaagattcatggcgcaaatacagctggagtggataaagtaccgtttccacaacgcatcaaatttgttgaggataaccatacgaatattatggaatgcgcgaaagcaccgctggaaaacacttggtgggcggaacaggactcgccgttctgttttctggcgttctgctttgagtatgctggcgtcatcaatagtggtctgtcgtacaactgtagcttgcctctggcatttgatggtagttgctccggcctgcaacatttctcagcgatgttacgcgacgaaattggcggcaaagctgtgaatctcctcccatctgcggaataccaggatatttatcgtatcgtcagcgacaaagttaacgagatgctgaaacaagatctgattaacggtacctctaccaccgtggaaacggtgactgataagaagacaggcgaaattacccaacgcacgaaatacgggaccaaagttatggcacagtggtggttagaacacggtgtgaatcgtggcgtcacgaaacgctcggttatgactttggtgtatgggagcaaagagtttggattccgcgatcaagtgctgagtgacaccattcaaccggcgatcgataacggcaaaggtgacatgtttctgaatccgaatcaggctgctggttacatggcgaaactgatctggaacgcagtgtccgggaccgtagtcgcagcagttgaggcgatgaactggctgaaaagtgcggcgaaattacttgctgctgaagtgaaggatcctaagacggatacagttctgcgtggccgctgcgcagtacattgggtgactcccgacggcttccctgtgtggcaggaatacaagaagcctattcagacgcgcttgaacctgatgttcctcggtcagttccgcttacagcctaccattaacaccaacaaagatagcgagattgatgcacacaaacaggagtctggtatcgctcctaactttgtacacagccaagacggtaaccaccttcgtatgactgtagtgtgggcacacgagaagtacggaatcgaatcttttgcactgattcacgactccttcggtaccattccggctgacgctgcgaacctgttcaaagcagtgcgcgaaactttcgttgacacatatgagtcttgtgatgtactggctgatttctacgaccagttcgctgaccagttgcacgagtctcaacgcgacaaaatgccagcacttccggctaaaggtaacttgaacctccgtgacatcttaaaatcggacttcgcgttcgcg

SEQ ID NO: 1492 - protein, 890 aa, synthetic construct
  REGION 1..890: note = Variant of RNA polymerase
MHHHHHHMNTINIAKNDFSDIELAAIPFNTLADHYGERLAREQLALEHESYEMGEARFRKMFERQLKAGEVADNAAAKPLITTLLPKMIARINDWFEEVKAKRGKRPTAFQFLQEIKPEAVAYITIKTTLACLTSADNTTVQAVASAIGRAIEDEARFGRIRDLEAKHFKKNVEEQLNKRVGHVYKKAFMQVVEHDMLSKGLLGGEAWSSWHKEDSIHVGVRCIEMLIESTGMVSLHRQNAGVVGQDSETIELAPEYAEAIATRAGALAGISPMFQPCVVPPKPWTGITGGGYWAAGRKPLQLVRTRSLAALRRYEEVSMPEVIKAVNIAQNTAWRINKKVLDVANTITQWQHCPVADVPAMDRGEMPARPLDIDTNEIALKAWKKEASAFYRKDKARVSRRLSMEFMLEQANKFANYEAIWFPQNMDWRGRVYAVPMFNPQGNDMTKGLLTFAQEKPIGEDGFYWLKIHGANTAGVDKVPFPQRIKFVEDNHTNIMECAKAPLENTWWAEQDSPFCFLAFCFEYAGVINSGLSYNCSLPLAFDGSCSGLQHFSAMLRDEIGGKAVNLLPSAEYQDIYRIVSDKVNEMLKQDLINGTSTTVETVTDKKTGEITQRTKYGTKVMAQWWLEHGVNRGVTKRSVMTLVYGSKEFGFRDQVLSDTIQPAIDNGKGDMFLNPNQAAGYMAKLIWNAVSGTVVAAVEAMNWLKSAAKLLAAEVKDPKTDTVLRGRCAVHWVTPDGFPVWQEYKKPIQTRLNLMFLGQFRLQPTINTNKDSEIDAHKQESGIAPNFVHSQDGNHLRMTVVWAHEKYGIESFALIHDSFGTIPADAANLFKAVRETFVDTYESCDVLADFYDQFADQLHESQRDKMPALPAKGNLNLRDILKSDFAFA

SEQ ID NO: 1493 - DNA, 2670 bp, synthetic construct
  misc_feature 1..2670: note = Variant of RNA polymerase
  source 1..2670: mol_type = other DNA
atgcaccatcaccatcaccatatgaacacgattaacattgctaagaacgacttctctgacatcgaactggctgctatcccgttcaacactctggctgaccattacggtgagcgtttagctcgcgaacagttggcccttgagcatgagtcttacgagatgggtgaagcacgcttccgcaagatgtttgagcgtcaacttaaagctggtgaggttgcggataacgctgccgccaagcctctcatcactaccctactccctaagatgattgcacgcatcaacgactggtttgaggaagtgaaagctaagcgcggcaagcgcccgacagccttccagttcctgcaagaaatcaagccggaagccgtagcgtacatcaccattaagaccactctggcttgcctaaccagtgcggacaatacaaccgttcaggctgtagcaagcgcaatcggtcgggccattgaggacgaggctcgcttcggtcgtatccgtgaccttgaagctaagcacttcaagaagaacgttgaggaacaactcaacaagcgcgtagggcacgtctacaagaaagcatttatgcaagttgtcgagcacgacatgctctctaagggtctactcggtggcgaggcgtggtcttcgtggcataaggaagactctattcatgtaggagtacgctgcatcgagatgctcattgagtcaaccggaatggttagcttacaccgccaaaatgctggcgtagtaggtcaagactctgagactatcgaactcgcacctgaatacgctgaggctatcgcaacccgtgcaggtgcgctggctggcatctctccgatgttccaaccttgcgtagttcctcctaagccgtggactggcattactggtggtggctattgggctgcggggcgcaaacccctgcagttagtacgtactcgcagtctggcggcgcttatgcgctatgaagaagtgtcgatgccggaggtcatcaaagcagtcaacattgcgcagaatacagcatggcgtattaacaagaaagttctcgacgtagcgaataccatcacccaatggcagcactgtccagtcgcggatgtgcctgcgatggatcgtggcgaaatgccagctcgtccgttggacatcgataccaacgagattgcacttaaagcgtggaagaaagaagcttccgcgttctaccgcaaagacaaagcacgcgttagccgtcgtctgtcaatggagtttatgttatctcaggcgaacaagtttgcgaattatgaggcaatctggtttccgcaaaacatggattggcgtgggcgcgtgtacgctgtcccgatgttcaatcctcagggcaacgatatgacgaaaggcctgctgacctttgcgcaggagaaacccattggtgaagacggcttctattggctcaagattcatggcgcaaatacagctggagtggataaagtaccgtttccacaacgcatcaaatttgttgaggataaccatacgaatattatggaatgcgcgaaagcaccgctggaaaacacttggtgggcggaacaggactcgccgttctgttttctggcgttctgctttgagtatgctggcgtcatcaatagtggtctgtcgtacaactgtagcttgcctctggcatttgatggtagttgctccggcctgcaacatttctcagcgatgttacgcgacgaaattggcggcaaagctgtgaatctcctcccatctgcggaataccaggatatttatcgtatcgtcagcgacaaagttaacgagatgctgaaacaagatctgattaacggtacctctaccaccgtggaaacggtgactgataagaagacaggcgaaattacccaacgcacgaaatacgggaccaaagttatggcacagtggtggttagaacacggtgtgaatcgtggcgtcacgaaacgctcggttatgactttggtgtatgggagcaaagagtttggattccgcgatcaagtgctgagtgacaccattcaaccggcgatcgataacggcaaaggtgacatgtttctgaatccgaatcaggctgctggttacatggcgaaactgatctggaacgcagtgtccgggaccgtagtcgcagcagttgaggcgatgaactggctgaaaagtgcggcgaaattacttgctgctgaagtgaaggatcctaagacggatacagttctgcgtggccgctgcgcagtacattgggtgactcccgacggcttccctgtgtggcaggaatacaagaagcctattcagacgcgcttgaacctgatgttcctcggtcagttccgcttacagcctaccattaacaccaacaaagatagcgagattgatgcacacaaacaggagtctggtatcgctcctaactttgtacacagccaagacggtaaccaccttcgtatgactgtagtgtgggcacacgagaagtacggaatcgaatcttttgcactgattcacgactccttcggtaccattccggctgacgctgcgaacctgttcaaagcagtgcgcgaaactttcgttgacacatatgagtcttgtgatgtactggctgatttctacgaccagttcgctgaccagttgcacgagtctcaacgcgacaaaatgccagcacttccggctaaaggtaacttgaacctccgtgacatcttaaaatcggacttcgcgttcgcg

SEQ ID NO: 1494 - protein, 890 aa, synthetic construct
  REGION 1..890: note = Variant of RNA polymerase
MHHHHHHMNTINIAKNDFSDIELAAIPFNTLADHYGERLAREQLALEHESYEMGEARFRKMFERQLKAGEVADNAAAKPLITTLLPKMIARINDWFEEVKAKRGKRPTAFQFLQEIKPEAVAYITIKTTLACLTSADNTTVQAVASAIGRAIEDEARFGRIRDLEAKHFKKNVEEQLNKRVGHVYKKAFMQVVEHDMLSKGLLGGEAWSSWHKEDSIHVGVRCIEMLIESTGMVSLHRQNAGVVGQDSETIELAPEYAEAIATRAGALAGISPMFQPCVVPPKPWTGITGGGYWAAGRKPLQLVRTRSLAALMRYEEVSMPEVIKAVNIAQNTAWRINKKVLDVANTITQWQHCPVADVPAMDRGEMPARPLDIDTNEIALKAWKKEASAFYRKDKARVSRRLSMEFMLSQANKFANYEAIWFPQNMDWRGRVYAVPMFNPQGNDMTKGLLTFAQEKPIGEDGFYWLKIHGANTAGVDKVPFPQRIKFVEDNHTNIMECAKAPLENTWWAEQDSPFCFLAFCFEYAGVINSGLSYNCSLPLAFDGSCSGLQHFSAMLRDEIGGKAVNLLPSAEYQDIYRIVSDKVNEMLKQDLINGTSTTVETVTDKKTGEITQRTKYGTKVMAQWWLEHGVNRGVTKRSVMTLVYGSKEFGFRDQVLSDTIQPAIDNGKGDMFLNPNQAAGYMAKLIWNAVSGTVVAAVEAMNWLKSAAKLLAAEVKDPKTDTVLRGRCAVHWVTPDGFPVWQEYKKPIQTRLNLMFLGQFRLQPTINTNKDSEIDAHKQESGIAPNFVHSQDGNHLRMTVVWAHEKYGIESFALIHDSFGTIPADAANLFKAVRETFVDTYESCDVLADFYDQFADQLHESQRDKMPALPAKGNLNLRDILKSDFAFA

SEQ ID NO: 1495 - DNA, 2670 bp, synthetic construct
  misc_feature 1..2670: note = Variant of RNA polymerase
  source 1..2670: mol_type = other DNA
atgcaccatcaccatcaccatatgaacacgattaacattgctaagaacgacttctctgacatcgaactggctgctatcccgttcaacactctggctgaccattacggtgagcgtttagctcgcgaacagttggcccttgagcatgagtcttacgagatgggtgaagcacgcttccgcaagatgtttgagcgtcaacttaaagctggtgaggttgcggataacgctgccgccaagcctctcatcactaccctactccctaagatgattgcacgcatcaacgactggtttgaggaagtgaaagctaagcgcggcaagcgcccgacagccttccagttcctgcaagaaatcaagccggaagccgtagcgtacatcaccattaagaccactctggcttgcctgaccagtgcggacaatacaaccgttcaggctgtagcaagcgcaatcggtcgggccattgaggacgaggctcgcttcggtcgtatccgtgaccttgaagctaagcacttcaagaagaacgttgaggaacaactcaacaagcgcgtagggcacgtctacaagaaagcatttatgcaagttgtcgagcacgacatgctctctaagggtctactcggtggcgaggcgtggtcttcgtggcataaggaagactctattcatgtaggagtacgctgcatcgagatgctcattgagtcaaccggaatggttagcttacaccgccaaaatgctggcgtagtgggtcaggactctgagactatcgaactcgcacctgaatacgctgaggctatcgcaacccgtgcaggtgcgctggctggcatctctccgatgttccaaccttgcgtagttcctcctaagccgtggactggcattactggtggtggctattgggctgcggggcgcaaacccctgcagttagtacgtactcgcagtctggcggcgcttcgccgctatgaagaagtgtcgatgccggaggtcatcaaagcagtcaacattgcgcagaatacagcatggcgtattaacaagaaagttctcgacgtagcgaataccatcacccaatggcagcactgtccagtcgcggatgtgcctgcgatggatcacggcgaaatgccagctcgtccgttggacatcgataccaacgagattgcacttaaagcgtggaagaaagaagcttccgcgttctaccgcaaagacaaagcacgcgttagccgtcgtctgtcaatggagtttatgttatctcaggcgaacaagtttgcgaattatgaggcaatctggtttccgcaaaacatggattggcgtgggcgcgtgtacgctgtcccgatgttcaatcctcagggcaacgatatgacgaaaggcctgctgacctttgcgcaggagaaacccattggtgaagacggcttctattggctcaagattcatggcgcaaatacagctggagtggataaagtaccgtttccacaacgcatcaaatttgttgaggataaccatacgaatattatggaatgcgcgaaagcaccgctggaaaacacttggtgggcggaacaggactcgccgttctgttttctggcgttctgctttgagtatgctggcgtcatcaatagtggtctgtcgtacaactgtagcttgcctctggcatttgatggtagttgctccggcctgcaacatttctcagcgatgttacgcgacgaaattggcggcaaagctgtgaatctcctcccatctgcggaataccaggatatttatcgtatcgtcagcgacaaagttaacgagatgctgaaacaagatctgattaacggtacctctaccaccgtggaaacggtgactgataagaagacaggcgaaattacccaacgcacgaaatacgggaccaaagttatggcacagtggtggttagaacacggtgtgaatcgtggcgtcacgaaacgctcggttatgactttggtgtatgggagcaaagagtttggattccgcgatcaagtgctgagtgacaccattcaaccggcgatcgataacggcaaaggtgacatgtttctgaatccgaatcaggctgctggttacatggcgaaactgatctggaacgcagtgtccgggaccgtagtcgcagcagttgaggcgatgaactggctgaaaagtgcggcgaaattacttgctgctgaagtgaaggatcctaagacggatacagttctgcgtggccgctgcgcagtacattgggtgactcccgacggcttccctgtgtggcaggaatacaagaagcctattcagacgcgcttgaacctgatgttcctcggtcagttccgcttacagcctaccattaacaccaacaaagatagcgagattgatgcacacaaacaggagtctggtatcgctcctaactttgtacacagccaagacggtaaccaccttcgtatgactgtagtgtgggcacacgagaagtacggaatcgaatcttttgcactgattcacgactccttcggtaccattccggctgacgctgcgaacctgttcaaagcagtgcgcgaaactttcgttgacacatatgagtcttgtgatgtactggctgatttctacgaccagttcgctgaccagttgcacgagtctcaacgcgacaaaatgccagcacttccggctaaaggtaacttgaacctccgtgacatcttaaaatcggacttcgcgttcgcg

SEQ ID NO: 1496 - protein, 890 aa, synthetic construct
  REGION 1..890: note = Variant of RNA polymerase
MHHHHHHMNTINIAKNDFSDIELAAIPFNTLADHYGERLAREQLALEHESYEMGEARFRKMFERQLKAGEVADNAAAKPLITTLLPKMIARINDWFEEVKAKRGKRPTAFQFLQEIKPEAVAYITIKTTLACLTSADNTTVQAVASAIGRAIEDEARFGRIRDLEAKHFKKNVEEQLNKRVGHVYKKAFMQVVEHDMLSKGLLGGEAWSSWHKEDSIHVGVRCIEMLIESTGMVSLHRQNAGVVGQDSETIELAPEYAEAIATRAGALAGISPMFQPCVVPPKPWTGITGGGYWAAGRKPLQLVRTRSLAALRRYEEVSMPEVIKAVNIAQNTAWRINKKVLDVANTITQWQHCPVADVPAMDHGEMPARPLDIDTNEIALKAWKKEASAFYRKDKARVSRRLSMEFMLSQANKFANYEAIWFPQNMDWRGRVYAVPMFNPQGNDMTKGLLTFAQEKPIGEDGFYWLKIHGANTAGVDKVPFPQRIKFVEDNHTNIMECAKAPLENTWWAEQDSPFCFLAFCFEYAGVINSGLSYNCSLPLAFDGSCSGLQHFSAMLRDEIGGKAVNLLPSAEYQDIYRIVSDKVNEMLKQDLINGTSTTVETVTDKKTGEITQRTKYGTKVMAQWWLEHGVNRGVTKRSVMTLVYGSKEFGFRDQVLSDTIQPAIDNGKGDMFLNPNQAAGYMAKLIWNAVSGTVVAAVEAMNWLKSAAKLLAAEVKDPKTDTVLRGRCAVHWVTPDGFPVWQEYKKPIQTRLNLMFLGQFRLQPTINTNKDSEIDAHKQESGIAPNFVHSQDGNHLRMTVVWAHEKYGIESFALIHDSFGTIPADAANLFKAVRETFVDTYESCDVLADFYDQFADQLHESQRDKMPALPAKGNLNLRDILKSDFAFA

SEQ ID NO: 1497 - DNA, 2670 bp, synthetic construct
  misc_feature 1..2670: note = Variant of RNA polymerase
  source 1..2670: mol_type = other DNA
atgcaccatcaccatcaccatatgaacacgattaacattgctaagaacgacttctctgacatcgaactggctgctatcccgttcaacactctggctgaccattacggtgagcgtttagctcgcgaacagttggcccttgagcatgagtcttacgagatgggtgaagcacgcttccgcaagatgtttgagcgtcaacttaaagctggtgaggttgcggataacgctgccgccaagcctctcatcactaccctactccctaagatgattgcacgcatcaacgactggtttgaggaagtgaaagctaagcgcggcaagcgcccgacagccttccagttcctgcaagaaatcaagccggaagccgtagcgtacatcaccattaagaccactctggcttgcctgacccgtgcggacaatacaaccgttcaggctgtagcaagcgcaatcggtcgggccattgaggacgaggctcgcttcggtcgtatccgtgaccttgaagctaagcacttcaagaagaacgttgaggaacaactcaacaagcgcgtagggcacgtctacaagaaagcatttatgcaagttgtcgagcacgacatgctctctaagggtctactcggtggcgaggcgtggtcttcgtggcataaggaagactctattcatgtaggagtacgctgcatcgagatgctcattgagtcaaccggaatggttagcttacaccgccaaaatgctggcgtagtgggtcaggactctgagactatcgaactcgcacctgaatacgctgaggctatcgcaacccgtgcaggtgcgctggctggcatctctccgatgttccaaccttgcgtagttcctcctaagccgtggactggcattactggtggtggctattgggctgcggggcgcaaacccctgcagttagtacgtactcgcagtctggcggcgcttcgccgctatgaagaagtgtcgatgccggaggtcatcaaagcagtcaacattgcgcagaatacagcatggcgtattaacaagaaagttctcgacgtagcgaataccatcacccaatggcagcactgtccagtcgcggatgtgcctgcgatggatcgtggcgaaatgccagctcgtccgttggacatcgataccaacgagattgcacttaaagcgtggaagaaagaagcttccgcgttctaccgcaaagacaaagcacgcgtgagccgtcgtctgtcgatggagtttatgttatctcaggcgaacaagtttgccaattatgaggcaatctggtttccgcaaaacatggattggcgtgggcgcgtgtacgctgtcccgatgttcaatcctcagggcaacgatatgacgaaaggcctgctgacctttgcgcaggagaaacccattggtgaagacggcttctattggctcaagattcatggcgcaaatacagctggagtggataaagtaccgtttccacaacgcatcaaatttgttgaggataaccatacgaatattatggaatgcgcgaaagcaccgctggaaaacacttggtgggcggaacaggactcgccgttctgttttctggcgttctgctttgagtatgctggcgtcatcaatagtggtctgtcgtacaactgtagcttgcctctggcatttgatggtagttgctccggcctgcaacatttctcagcgatgttacgcgacgaaattggcggcaaagctgtgaatctcctcccatctgcggaataccaggatatttatcgtatcgtcagcgacaaagttaacgagatgctgaaacaagatctgattaacggtacctctaccaccgtggaaacggtgactgataagaagacaggcgaaattacccaacgcacgaaatacgggaccaaagttatggcacagtggtggttagaacacggtgtgaatcgtggcgtcacgaaacgctcggttatgactttggtgtatgggagcaaagagtttggattccgcgatcaagtgctgagtgacaccattcaaccggcgatcgataacggcaaaggtgacatgtttctgaatccgaatcaggctgctggttacatggcgaaactgatctggaacgcagtgtccgggaccgtagtcgcagcagttgaggcgatgaactggctgaaaagtgcggcgaaattacttgctgctgaagtgaaggatcctaagacggatacagttctgcgtggccgctgcgcagtacattgggtgactcccgacggcttccctgtgtggcaggaatacaagaagcctattcagacgcgcttgaacctgatgttcctcggtcagttccgcttacagcctaccattaacaccaacaaagatagcgagattgatgcacacaaacaggagtctggtatcgctcctaactttgtacacagccaagacggtaaccaccttcgtatgactgtagtgtgggcacacgagaagtacggaatcgaatcttttgcactgattcacgactccttcggtaccattccggctgacgctgcgaacctgttcaaagcagtgcgcgaaactttcgttgacacatatgagtcttgtgatgtactggctgatttctacgaccagttcgctgaccagttgcacgagtctcaacgcgacaaaatgccagcacttccggctaaaggtaacttgaacctccgtgacatcttaaaatcggacttcgcgttcgcg

SEQ ID NO: 1498 - protein, 890 aa, synthetic construct
  REGION 1..890: note = Variant of RNA polymerase
MHHHHHHMNTINIAKNDFSDIELAAIPFNTLADHYGERLAREQLALEHESYEMGEARFRKMFERQLKAGEVADNAAAKPLITTLLPKMIARINDWFEEVKAKRGKRPTAFQFLQEIKPEAVAYITIKTTLACLTRADNTTVQAVASAIGRAIEDEARFGRIRDLEAKHFKKNVEEQLNKRVGHVYKKAFMQVVEHDMLSKGLLGGEAWSSWHKEDSIHVGVRCIEMLIESTGMVSLHRQNAGVVGQDSETIELAPEYAEAIATRAGALAGISPMFQPCVVPPKPWTGITGGGYWAAGRKPLQLVRTRSLAALRRYEEVSMPEVIKAVNIAQNTAWRINKKVLDVANTITQWQHCPVADVPAMDRGEMPARPLDIDTNEIALKAWKKEASAFYRKDKARVSRRLSMEFMLSQANKFANYEAIWFPQNMDWRGRVYAVPMFNPQGNDMTKGLLTFAQEKPIGEDGFYWLKIHGANTAGVDKVPFPQRIKFVEDNHTNIMECAKAPLENTWWAEQDSPFCFLAFCFEYAGVINSGLSYNCSLPLAFDGSCSGLQHFSAMLRDEIGGKAVNLLPSAEYQDIYRIVSDKVNEMLKQDLINGTSTTVETVTDKKTGEITQRTKYGTKVMAQWWLEHGVNRGVTKRSVMTLVYGSKEFGFRDQVLSDTIQPAIDNGKGDMFLNPNQAAGYMAKLIWNAVSGTVVAAVEAMNWLKSAAKLLAAEVKDPKTDTVLRGRCAVHWVTPDGFPVWQEYKKPIQTRLNLMFLGQFRLQPTINTNKDSEIDAHKQESGIAPNFVHSQDGNHLRMTVVWAHEKYGIESFALIHDSFGTIPADAANLFKAVRETFVDTYESCDVLADFYDQFADQLHESQRDKMPALPAKGNLNLRDILKSDFAFA

SEQ ID NO: 1499 - DNA, 2670 bp, synthetic construct
  misc_feature 1..2670: note = Variant of RNA polymerase
  source 1..2670: mol_type = other DNA
atgcaccatcaccatcaccatatgaacacgattaacattgctaagaacgacttctctgacatcgaactggctgctatcccgttcaacactctggctgaccattacggtgagcgtttagctcgcgaacagttggcccttgagcatgagtcttacgagatgggtgaagcacgcttccgcaagatgtttgagcgtcaacttaaagctggtgaggttgcggataacgctgccgccaagcctctcatcactaccctactccctaagatgattgcacgcatcaacgactggtttgaggaagtgaaagctaagcgcggcaagcgcccgacagccttccagttcctgcaagaaatcaagccggaagccgtagcgtacatcaccattaagaccactctggcttgcctaaccagtgcggacaatacaaccgttcaggctgtagcaagcgcaatcggtcgggccattgaggacgaggctcgcttcggtcgtatccgtgaccttgaagctaagcacttcaagaagaacgttgaggaacaactcaacaagcgcgtagggcacgtctacaagaaagcatttatgcaagttgtcgagcacgacatgctctctaagggtctactcggtggcgaggcgtggtcttcgtggcataaggaagactctattcatgtaggagtacgctgcatcgagatgctcattgagtcaaccggaatggttagcttacaccgccaaaatgctggcgtagtaggtcaagactctgagactatcgaactcgcacctgaatacgctgaggctatcgcaacccgtgcaggtgcgctggctggcatctctccgatgttccaaccttgcgtagttcctcctaagccgtggactggcattactggtggtggctattgggctgcggggcgcaaacccctgcagttagtacgtactcgcagtctggcggcgcttcgccgctatgaagaagtgtcgatgccggaggtcatcaaagcagtcaacattgcgcagaatacagcatggcgtattaacaagaaagttctcgacgtagcgaataccatcacccaatggcagcactgtccagtcgcggatgtgcctgcgatggatcgtggcgaaatgccagctcgtccgttggacatcgataccaacgagattgcacttaaagcgtggaagaaagaagcttccgcgttctaccgcaaagacaaagcacgcgttagccgtcgtctgtcaatggagtttatgttatctcaggcgaacaagtttgcgaattatgaggcaatctggtttccgcaaaacatggattggcgtgggcgcgtgtacgctgtcccgatgttcaatcctcagggcaacgatatgacgaaaggcctgctgacctttgcgcaggagaaacccattggtgaagacggcttctattggctcaagattcatggcgcaaatacagctggagtggataaagtaccgtttccacaacgcatcaaatttgttgaggataaccatacgaatattatggaatgcgcgaaagcaccgctggaaaacacttggtgggcggaacaggactcgccgttctgttttctggcgttctgctttgagtatgctggcgtcatcaatagtggtctgtcgtacaactgtagcttgcctctggcatttgatggtagttgctccggcctgcaacatttctcagcgatgttacgcgacgaaattggcggcaaagctgtgaatctcctcccatctgcggaataccaggatatttatcgtatcgtcagcgacaaagttaacgagatgctgaaacaagatctgattaacggtacctctaccaccgtggaaacggtgactgataagaatacaggcgaaattacccaacgcacgaaatacgggaccaaagttatggcacagtggtggttagaacacggtgtgaatcgtggcgtcacgaaacgctcggttatgactttggtgtatgggagcaaagagtttggattccgcgatcaagtgctgagtgacaccattcaaccggcgatcgataacggcaaaggtgacatgtttctgaatccgaatcaggctgctggttacatggcgaaactgatctggaacgcagtgtccgggaccgtagtcgcagcagttgaggcgatgaactggctgaaaagtgcggcgaaattacttgctgctgaagtgaaggatcctaagacggatacagttctgcgtggccgctgcgcagtacattgggtgactcccgacggcttccctgtgtggcaggaatacaagaagcctattcagacgcgcttgaacctgatgttcctcggtcagttccgcttacagcctaccattaacaccaacaaagatagcgagattgatgcacacaaacaggagtctggtatcgctcctaactttgtacacagccaagacggtaaccaccttcgtatgactgtagtgtgggcacacgagaagtacggaatcgaatcttttgcactgattcacgactccttcggtaccattccggctgacgctgcgaacctgttcaaagcagtgcgcgaaactttcgttgacacatatgagtcttgtgatgtactggctgatttctacgaccagttcgctgaccagttgcacgagtctcaacgcgacaaaatgccagcacttccggctaaaggtaacttgaacctccgtgacatcttaaaatcggacttcgcgttcgcg

SEQ ID NO: 1500 - protein, 890 aa, synthetic construct
  REGION 1..890: note = Variant of RNA polymerase
MHHHHHHMNTINIAKNDFSDIELAAIPFNTLADHYGERLAREQLALEHESYEMGEARFRKMFERQLKAGEVADNAAAKPLITTLLPKMIARINDWFEEVKAKRGKRPTAFQFLQEIKPEAVAYITIKTTLACLTSADNTTVQAVASAIGRAIEDEARFGRIRDLEAKHFKKNVEEQLNKRVGHVYKKAFMQVVEHDMLSKGLLGGEAWSSWHKEDSIHVGVRCIEMLIESTGMVSLHRQNAGVVGQDSETIELAPEYAEAIATRAGALAGISPMFQPCVVPPKPWTGITGGGYWAAGRKPLQLVRTRSLAALRRYEEVSMPEVIKAVNIAQNTAWRINKKVLDVANTITQWQHCPVADVPAMDRGEMPARPLDIDTNEIALKAWKKEASAFYRKDKARVSRRLSMEFMLSQANKFANYEAIWFPQNMDWRGRVYAVPMFNPQGNDMTKGLLTFAQEKPIGEDGFYWLKIHGANTAGVDKVPFPQRIKFVEDNHTNIMECAKAPLENTWWAEQDSPFCFLAFCFEYAGVINSGLSYNCSLPLAFDGSCSGLQHFSAMLRDEIGGKAVNLLPSAEYQDIYRIVSDKVNEMLKQDLINGTSTTVETVTDKNTGEITQRTKYGTKVMAQWWLEHGVNRGVTKRSVMTLVYGSKEFGFRDQVLSDTIQPAIDNGKGDMFLNPNQAAGYMAKLIWNAVSGTVVAAVEAMNWLKSAAKLLAAEVKDPKTDTVLRGRCAVHWVTPDGFPVWQEYKKPIQTRLNLMFLGQFRLQPTINTNKDSEIDAHKQESGIAPNFVHSQDGNHLRMTVVWAHEKYGIESFALIHDSFGTIPADAANLFKAVRETFVDTYESCDVLADFYDQFADQLHESQRDKMPALPAKGNLNLRDILKSDFAFA

SEQ ID NO: 1501 - DNA, 2670 bp, synthetic construct
  misc_feature 1..2670: note = Variant of RNA polymerase
  source 1..2670: mol_type = other DNA
atgcaccatcaccatcaccatatgaacacgattaacattgctaagaacgacttctctgacatcgaactggctgctatcccgttcaacactctggctgaccattacggtgagcgtttagctcgcgaacagttggcccttgagcatgagtcttacgagatgggtgaagcacgcttccgcaagatgtttgagcgtcaacttaaagctggtgaggttgcggataacgctgccgccaagcctctcatcactaccctactccctaagatgattgcacgcatcaacgactggtttgaggaagtgaaagctaagcgcggcaagcgcccgacagccttccagttcctgcaagaaatcaagccggaagccgtagcgtacatcaccattaagaccactctggcttgcctaaccagtgcggacaatacaaccgttcaggctgtagcaagcgcaatcggtcgggccattgaggacgaggctcgcttcggtcgtatccgtgaccttgaagctaagcacttcaagaagaacgttgaggaacaactcaacaagcgcgtagggcacgtctacaagaaagcatttatgcaagttgtcgagcacgacatgctctctaagggtctactcggtggcgaggcgtggtcttcgtggcataaggaagactctattcatgtaggagtacgctgcatcgagatgctcattgagtcaaccggaatggttagcttacaccgccaaaatgctggcgtagtgggtgcagactctgagactatcgaactcgcacctgaatacgctgaggctatcgcaacccgtgcaggtgcgctggctggcatctctccgatgttccaaccttgcgtagttcctcctaagccgtggactggcattactggtggtggctattgggctgcggggcgcaaacccctgcagttagtacgtactcgcagtctggcggcgcttcgccgctatgaagaagtgtcgatgccggaggtcatcaaagcagtcaacattgcgcagaatacagcatggcgtattaacaagaaagttctcgacgtagcgaataccatcacccaatggcagcactgtccagtcgcggatgtgcctgcgatggatcgtggcgaaatgccagctcgtccgttggacatcgataccaacgagattgcacttaaagcgtggaagaaagaagcttccgcgttctaccgcaaagacaaagcacgcatgagccgtcgtctgtcgatggagtttatgttatctcaggcgaacaagtttgcgaattatgaggcaatctggtttccgcaaaacatggattggcgtgggcgcgtgtacgctgtcccgatgttcaatcctcagggcaacgatatgacgaaaggcctgctgacctttgcgcaggagaaacccattggtgaagacggcttctattggctcaagattcatggcgcaaatacagctggagtggataaagtaccgtttccacaacgcatcaaatttgttgaggataaccatacgaatattatggaatgcgcgaaagcaccgctggaaaacacttggtgggcggaacaggactcgccgttctgctttctggcgttctgctttgagtatgctggcgtcatcaatagtggtctgtcgtacaactgtagcttgcctctggcatttgatggtagttgctccggcctgcaacatttctcagcgatgttacgcgacgaaattggcggcaaagctgtgaatctcctcccatctgcggaataccaggatatttatcgtatcgtcagcgacaaagttaacgagatgctgaaacaagatctgattaacggtacctctaccaccgtggaaacggtgactgataaaaagacaggcgaaattacccaacgcacgaaatacgggaccaaagttatggcacagtggtggttagaacacggtgtgaatcgtggcgtcacgaaacgcccggttatgactttggtgtatgggagcaaagagtttggattccgcgatcaagtgctgagtgacaccattcaacgggcgatcgataacggcaagggtgacatgtttctgaatccgaatcaggctgctggttacatggcgaaactgatctggaacgcagtgtccgggaccgtagtcgcagcagttgaggcgatgaactggctgaaaagtgcggcgaaattacttgctgctgaagtgaaggatgagaagacggatacagttctgcgtggccgctgcgcagtacattgggtgactcccgacggcttccctgtgtggcaggaatacaagaagcctattcaaacgcgcttgaacctgatgttcctcggtcagttccgcttacagcctaccattaacaccaacaaagatagcgagattgatgcacgcaaacaggtgtctggtatcgctcctaactttgtacacagcctggacggtaaccaccttcgtatgactgtagtgtgggcacacgagaagtacggaatcgaatcttttgcactgattcacgactccttcggtaccattccggctgacgctgcgaacctgttcaaagcagtgcgcgaaactttcgttgacacatatgagtcttgtgatgtactggctgatttctacgaccagattgctgaccagttgcacgagtctcaacgcgacaaaatgccagcacttccggctaaaggtaagttgaacctccgtgacatcttaaaatcggacttcgcgttcgcg

SEQ ID NO: 1502 - protein, 890 aa, synthetic construct
  REGION 1..890: note = Variant of RNA polymerase
MHHHHHHMNTINIAKNDFSDIELAAIPFNTLADHYGERLAREQLALEHESYEMGEARFRKMFERQLKAGEVADNAAAKPLITTLLPKMIARINDWFEEVKAKRGKRPTAFQFLQEIKPEAVAYITIKTTLACLTSADNTTVQAVASAIGRAIEDEARFGRIRDLEAKHFKKNVEEQLNKRVGHVYKKAFMQVVEHDMLSKGLLGGEAWSSWHKEDSIHVGVRCIEMLIESTGMVSLHRQNAGVVGADSETIELAPEYAEAIATRAGALAGISPMFQPCVVPPKPWTGITGGGYWAAGRKPLQLVRTRSLAALRRYEEVSMPEVIKAVNIAQNTAWRINKKVLDVANTITQWQHCPVADVPAMDRGEMPARPLDIDTNEIALKAWKKEASAFYRKDKARMSRRLSMEFMLSQANKFANYEAIWFPQNMDWRGRVYAVPMFNPQGNDMTKGLLTFAQEKPIGEDGFYWLKIHGANTAGVDKVPFPQRIKFVEDNHTNIMECAKAPLENTWWAEQDSPFCFLAFCFEYAGVINSGLSYNCSLPLAFDGSCSGLQHFSAMLRDEIGGKAVNLLPSAEYQDIYRIVSDKVNEMLKQDLINGTSTTVETVTDKKTGEITQRTKYGTKVMAQWWLEHGVNRGVTKRPVMTLVYGSKEFGFRDQVLSDTIQRAIDNGKGDMFLNPNQAAGYMAKLIWNAVSGTVVAAVEAMNWLKSAAKLLAAEVKDEKTDTVLRGRCAVHWVTPDGFPVWQEYKKPIQTRLNLMFLGQFRLQPTINTNKDSEIDARKQVSGIAPNFVHSLDGNHLRMTVVWAHEKYGIESFALIHDSFGTIPADAANLFKAVRETFVDTYESCDVLADFYDQIADQLHESQRDKMPALPAKGKLNLRDILKSDFAFA

SEQ ID NO: 1503 - DNA, 2670 bp, synthetic construct
  misc_feature 1..2670: note = Variant of RNA polymerase
  source 1..2670: mol_type = other DNA
atgcaccatcaccatcaccatatgaacacgattaacattgctaagaacgacttctctgacatcgaactggctgctatcccgttcaacactctggctgaccattacggtgagcgtttagctcgcgaacagttggcccttgagcatgagtcttacgagatgggtgaagcacgcttccgcaagatgtttgagcgtcaacttaaagctggtgaggttgcggataacgctgccgccaagcctctcatcactaccctactccctaagatgattgcacgcatcaacgactggtttgaggaagtgaaagctaagcgcggcaagcgcccgacagccttccagttcctgcaagaaatcaagccggaagccgtagcgtacatcaccattaagaccactctggcttgcctaaccagtgcggacaatacaaccgttcaggctgtagcaagcgcaatcggtcgggccattgaggacgaggctcgcttcggtcgtatccgtgaccttgaagctaagcacttcaagaagaacgttgaggaacaactcaacaagcgcgtagggcacgtctacaagaaagcatttatgcaagttgtcgagcacgacatgctctctaagggtctactcggtggcgaggcgtggtcttcgtggcataaggaagactctattcatgtaggagtacgctgcatcgagatgctcattgagtcaaccggaatggttagcttacaccgccaaaatgctggcgtagtgggtgcagactctgagactatcgaactcgcacctgaatacgctgaggctatcgcaacccgtgcaggtgcgctggctggcatctctccgatgttccaaccttgcgtagttcctcctaagccgtggactggcattactggtggtggctattgggctgcggggcgcaaacccctgcagttagtacgtactcgcagtctggcggcgcttcgccgctatgaagaagtgtcgatgccggaggtcatcaaagcagtcaacattgcgcagaatacagcatggcgtattaacaagaaagttctcgacgtagcgaataccatcacccaatggaagcactgtccagtccgtgatattcctgcgatggatcgtggcgaaatgccagctcgtccgttggacatcgataccaaccctattgcacttaaagcgtggaagaaagaagcttccgcgttctaccgcaaagacaaagcacgcatgagccgtcgtctgtcgatggagtttatgttatctcaggcgaacaagtttgcgaattatgaggcaatctggtttccgcaaaacatggattggcgtgggcgcgtgtacgctgtcccgatgttcaatcctcagggcaacgatatgacgaaaggcctgctgacctttgcgcaggagaaacccattggtgaagacggcttctattggctcaagattcatggcgcaaatacagctggagtggataaagtaccgtttccacaacgcatcaaatttgttgaggataaccatacgaatattatggaatgcgcgaaagcaccgctggaaaacacttggtgggcggaacaggactcgccgttctgctttctggcgttctgctttgagtatgctggcgtcatcaatagtggtctgtcgtacaactgtagcttgcctctggcatttgatggtagttgctccggcctgcaacatttctcagcgatgttacgcgacgaaattggcggcaaagctgtgaatctcctcccatctgcggaataccaggatatttatcgtatcgtcagcgacaaagttaacgagatgctgaaacaagatctgattaacggtacctctaccaccgtggaaacggtgactgataaaaagacaggcgaaattacccaacgcacgaaatacgggaccaaagttatggcacaatggtggttagaacacggtgtgacccgtggcgtcacgaaacgcccggttatgactttggtgtatgggagcaaagagtttggattccgcgatcaagtgctgagtgacaccattcaaccggcgatcgataacggcaagggtctgatgtttctgaatccgaatcaggctgctggttacatggcgaaactgatctggaacgcagtgtccgggaccgtagtcgcagcagttgaggcgatgaactggctgaaaagtgcggcgaaattacttgctgctgaagtgaaggatgagaagacggatacagttctgcgtggccgctgcgcagtacattgggtgactcccgacggcttccctgtgtggcaggaatacaagaagcctattcaaacgcgcttgaacctgatgttcctcggtcagttccgcttacagcctaccattaacaccaacaaagatagcgagattgatgcacgcaaacaggtgtctggtatcgctcctaactttgtacacagcctggacggtaaccaccttcgtatgactgtagtgtgggcacacgagaagtacggaatcgaatcttttgcactgattcacgactccttcggtaccattccggctgacgctgcgaacctgttcaaagcagtgcgcgaaactttcgttgacacatatgagtcttgtgatgtactggctgatttctacgaccagattgctgaccagttgcacgagtctcaacgcgacaaaatgccagcacttccggctaaaggtaagttgaacctccgtgacatcttaaaatcggacttcgcgttcgcg

SEQ ID NO: 1504 - protein, 890 aa, synthetic construct
  REGION 1..890: note = Variant of RNA polymerase
MHHHHHHMNTINIAKNDFSDIELAAIPFNTLADHYGERLAREQLALEHESYEMGEARFRKMFERQLKAGEVADNAAAKPLITTLLPKMIARINDWFEEVKAKRGKRPTAFQFLQEIKPEAVAYITIKTTLACLTSADNTTVQAVASAIGRAIEDEARFGRIRDLEAKHFKKNVEEQLNKRVGHVYKKAFMQVVEHDMLSKGLLGGEAWSSWHKEDSIHVGVRCIEMLIESTGMVSLHRQNAGVVGADSETIELAPEYAEAIATRAGALAGISPMFQPCVVPPKPWTGITGGGYWAAGRKPLQLVRTRSLAALRRYEEVSMPEVIKAVNIAQNTAWRINKKVLDVANTITQWKHCPVRDIPAMDRGEMPARPLDIDTNPIALKAWKKEASAFYRKDKARMSRRLSMEFMLSQANKFANYEAIWFPQNMDWRGRVYAVPMFNPQGNDMTKGLLTFAQEKPIGEDGFYWLKIHGANTAGVDKVPFPQRIKFVEDNHTNIMECAKAPLENTWWAEQDSPFCFLAFCFEYAGVINSGLSYNCSLPLAFDGSCSGLQHFSAMLRDEIGGKAVNLLPSAEYQDIYRIVSDKVNEMLKQDLINGTSTTVETVTDKKTGEITQRTKYGTKVMAQWWLEHGVTRGVTKRPVMTLVYGSKEFGFRDQVLSDTIQPAIDNGKGLMFLNPNQAAGYMAKLIWNAVSGTVVAAVEAMNWLKSAAKLLAAEVKDEKTDTVLRGRCAVHWVTPDGFPVWQEYKKPIQTRLNLMFLGQFRLQPTINTNKDSEIDARKQVSGIAPNFVHSLDGNHLRMTVVWAHEKYGIESFALIHDSFGTIPADAANLFKAVRETFVDTYESCDVLADFYDQIADQLHESQRDKMPALPAKGKLNLRDILKSDFAFA

SEQ ID NO: 1505 - DNA, 2670 bp, synthetic construct
  misc_feature 1..2670: note = Variant of RNA polymerase
  source 1..2670: mol_type = other DNA
atgcaccatcaccatcaccatatgaacacgattaacattgctaagaacgacttctctgacatcgaactggctgctatcccgttcaacactctggctgaccattacggtgagcgtttagctcgcgaacagttggcccttgagcatgagtcttacgagatgggtgaagcacgcttccgcaagatgtttgagcgtcaacttaaagctggtgaggttgcggataacgctgccgccaagcctctcatcactaccctactccctaagatgattgcacgcatcaacgactggtttgaggaagtgaaagctaagcgcggcaagcgcccgacagccttccagttcctgcaagaaatcaagccggaagccgtagcgtacatcaccattaagaccactctggcttgcctaaccagtgcggacaatacaaccgttcaggctgtagcaagcgcaatcggtcgggccattgaggacgaggctcgcttcggtcgtatccgtgaccttgaagctaagcacttcaagaagaacgttgaggaacaactcaacaagcgcgtagggcacgtctacaagaaagcatttatgcaagttgtcgagcacgacatgctctctaagggtctactcggtggcgaggcgtggtcttcgtggcataaggaagactctattcatgtaggagtacgctgcatcgagatgctcattgagtcaaccggaatggttagcttacaccgccaaaatgctggcgtagtgggtgcagactctgagactatcgaactcgcacctgaatacgctgaggctatcgcaacccgtgcaggtgcgctggctggcatctctccgatgttccaaccttgcgtagttcctcctaagccgtggactggcattactggtggtggctattgggctgcggggcgcaaacccctgcagttagtacgtactcgcagtctggcggcgcttcgccgctatgaagaagtgtcgatgccggaggtcatcaaagcagtcaacattgcgcagaatacagcatggcgtattaacaagaaagttctcgacgtagcgaataccatcacccaatggaagcactgtccagtcgcggatgtgcctgcgatggatcgtggcgaaatgccagctcgtccgttggacatcgataccaacgagattgcacttaaagcgtggaagaaagaagcttccgcgttctaccgcaaagacaaagcacgcatgagccgtcgtctgtcgatggagtttatgttatctcaggcgaacaagtttgcgaattatgaggcaatctggtttccgcaaaacatggattggcgtgggcgcgtgtacgctgtcccgatgttcaatcctcagggcaacgatatgacgaaaggcctgctgacctttgcgcaggagaaacccattggtgaagacggcttctattggctcaagattcatggcgcaaatacagctggagtggataaagtaccgtttccacaacgcatcaaatttgttgaggataaccatacgaatattatggaatgcgcgaaagcaccgctggaaaacacttggtgggcggaacaggactcgccgttctgctttctggcgttctgctttgagtatgctggcgtcatcaatagtggtctgtcgtacaactgtagcttgcctctggcatttgatggtagttgctccggcctgcaacatttctcagcgatgttacgcgacgaaattggcggcaaagctgtgaatctcctcccatctgcggaataccaggatatttatcgtatcgtcagcgacaaagttaacgagatgctgaaacaagatctgattaacggtacctctaccaccgtggaaacggtgactgataaaaagacaggcgaaattacccaacgcacgaaatacgggaccaaagttatggcacagtggtggttagagcacggtgtgacccgtggcgtcacgaaacgcccggttatgactttggtgtatgggagcaaagagtttggattccgcgatcaagtgctgagtgacaccattcaaccggcgatcgataacggcaagggtgacatgtttctgaatccgaatcaggctgctggttacatggcgaaactgatctggaacgcagtgtccgggaccgtagtcgcagcagttgaggcgatgaactggctgaaaagtgcggcgaaattacttgctgctgaagtgaaggatgagaagacggatacagttctgcgtggccgctgcgcagtacattgggtgactcccgacggcttccctgtgtggcaggaatacaagaagcctattcaaacgcgcttgaacctgatgttcctcggtcagttccgcttacagcctaccattaacaccaacaaagatagcgagattgatgcacgcaaacaggtgtctggtatcgctcctaactttgtacacagcctggacggtaaccaccttcgtatgactgtagtgtgggcacacgagaagtacggaatcgaatcttttgcactgattcacgactccttcggtaccattccggctgacgctgcgaacctgttcaaagcagtgcgcgaaactttcgttgacacatatgagtcttgtgatgtactggctgatttctacgaccagattgctgaccagttgcacgagtctcaacgcgacaaaatgccagcacttccggctaaaggtaagttgaacctccgtgacatcttaaaatcggacttcgcgttcgcg

SEQ ID NO: 1506 - protein, 890 aa, synthetic construct
  REGION 1..890: note = Variant of RNA polymerase
MHHHHHHMNTINIAKNDFSDIELAAIPFNTLADHYGERLAREQLALEHESYEMGEARFRKMFERQLKAGEVADNAAAKPLITTLLPKMIARINDWFEEVKAKRGKRPTAFQFLQEIKPEAVAYITIKTTLACLTSADNTTVQAVASAIGRAIEDEARFGRIRDLEAKHFKKNVEEQLNKRVGHVYKKAFMQVVEHDMLSKGLLGGEAWSSWHKEDSIHVGVRCIEMLIESTGMVSLHRQNAGVVGADSETIELAPEYAEAIATRAGALAGISPMFQPCVVPPKPWTGITGGGYWAAGRKPLQLVRTRSLAALRRYEEVSMPEVIKAVNIAQNTAWRINKKVLDVANTITQWKHCPVADVPAMDRGEMPARPLDIDTNEIALKAWKKEASAFYRKDKARMSRRLSMEFMLSQANKFANYEAIWFPQNMDWRGRVYAVPMFNPQGNDMTKGLLTFAQEKPIGEDGFYWLKIHGANTAGVDKVPFPQRIKFVEDNHTNIMECAKAPLENTWWAEQDSPFCFLAFCFEYAGVINSGLSYNCSLPLAFDGSCSGLQHFSAMLRDEIGGKAVNLLPSAEYQDIYRIVSDKVNEMLKQDLINGTSTTVETVTDKKTGEITQRTKYGTKVMAQWWLEHGVTRGVTKRPVMTLVYGSKEFGFRDQVLSDTIQPAIDNGKGDMFLNPNQAAGYMAKLIWNAVSGTVVAAVEAMNWLKSAAKLLAAEVKDEKTDTVLRGRCAVHWVTPDGFPVWQEYKKPIQTRLNLMFLGQFRLQPTINTNKDSEIDARKQVSGIAPNFVHSLDGNHLRMTVVWAHEKYGIESFALIHDSFGTIPADAANLFKAVRETFVDTYESCDVLADFYDQIADQLHESQRDKMPALPAKGKLNLRDILKSDFAFA

SEQ ID NO: 1507 - DNA, 2670 bp, synthetic construct
  misc_feature 1..2670: note = Variant of RNA polymerase
  source 1..2670: mol_type = other DNA
atgcaccatcaccatcaccatatgaacacgattaacattgctaagaacgacttctctgacatcgaactggctgctatcccgttcaacactctggctgaccattacggtgagcgtttagctcgcgaacagttggcccttgagcatgagtcttacgagatgggtgaagcacgcttccgcaagatgtttgagcgtcaacttaaagctggtgaggttgcggataacgctgccgccaagcctctcatcactaccctactccctaagatgattgcacgcatcaacgactggtttgaggaagtgaaagctaagcgcggcaagcgcccgacagccttccagttcctgcaagaaatcaagccggaagccgtagcgtacatcaccattaagaccactctggcttgcctaaccagtgcggacaatacaaccgttcaggctgtagcaagcgcaatcggtcgggccattgaggacgaggctcgcttcggtcgtatccgtgaccttgaagctaagcacttcaagaagaacgttgaggaacaactcaacaagcgcgtagggcacgtctacaagaaagcatttatgcaagttgtcgagcacgacatgctctctaagggtctactcggtggcgaggcgtggtcttcgtggcataaggaagactctattcatgtaggagtacgctgcatcgagatgctcattgagtcaaccggaatggttagcttacaccgccaaaatgctggcgtagtgggtgcagactctgagactatcgaactcgcacctgaatacgctgaggctatcgcaacccgtgcaggtgcgctggctggcatctctccgatgttccaaccttgcgtagttcctcctaagccgtggactggcattactggtggtggctattgggctgcggggcgcaaacccctgcagttagtacgtactcgcagtctggcggcgcttcgccgctatgaagaagtgtcgatgccggaggtcatcaaagcagtcaacattgcgcagaatacagcatggcgtattaacaagaaagttctcgacgtagcgaataccatcacccaatggcagcactgtccagtccgtgatgttcctgcgatggatcgtggcgaaatgccagctaagccgttggacatcgataccaacgagattgcacttaaagcgtggaagaaagcggcttcggcgttctaccgccgcgacaaagcacgcatgagccgtcgtctgtcgatggagtttatgttatctcaggcgaacaagtttgcgaattatgaggcaatctggtttccgcaaaacatggattggcgtgggcgcgtgtacgctgtcccgatgttcaatcctcagggcaacgatatgacgaaaggcctgctgacctttgcgcaggagaaacccattggtgaagacggcttctattggctcaagattcatggcgcaaatacagctggagtggataaagtaccgtttccacaacgcatcaaatttgttgaggataaccatacgaatattatggaatgcgcgaaagcaccgctggaaaacacttggtgggcggaacaggactcgccgttctgctttctggcgttctgctttgagtatgctggcgtcatcaatagtggtctgtcgtacaactgtagcttgcctctggcatttgatggtagttgctccggcctgcaacatttctcagcgatgttacgcgacgaaattggcggcaaagctgtgaatctcctcccatctgcggaataccaggatatttatcgtatcgtcagcgacaaagttaacgagatgctgaaacaagatctgattaacggtacctctaccaccgtggaaacggtgactgataaaaagacaggcgaaattacccaacgcacgaaatacgggaccaaagttatggcagggtggtggttagagcacggtgtgaaccgtggcgtcacgaaacgcccggttatgactttggtgtatgggagcaaagagtttggattccgcgatcaagtgctgagtgacaccattcaaccggcgatcgataacggcaagggtgacatgtttctgaatccgaatcaggctgctggttacatggcgaaactgatctggaacgcggtgtccgggaccgtagtcgcagcagttgaggcgatgaactggctgaaaagtgcggcgaaattacttgctgctgaagtgaaggatgagaagacggatacaattctgcgtggccgctgcgcagtacattgggtgactcccgacggcttccctgtgtggcaggaatacaagaagcctattcaaacgcgcttgaacctgatgttcctcggtcagttccgcttacagcctaccattaacaccaacaaagatagcgagattgatgcacgcaaacaggtgtctggtatcgctcctaactttgtacacagcctggacggtaaccaccttcgtatgactgtagtgtgggcacacgagaagtacggaatcgaatcttttgcactgattcacgactccttcggtaccattccggctgacgctgcgaacctgttcaaagcagtgcgcgaaactttcgttgacacatatgagtcttgtgatgtactggctgatttctacgaccagattgctgaccagttgcacgagtctcaacgcgacaaaatgccagcacttccggctaaaggtaagttgaacctccgtgacatcttaaaatcggacttcgcgttcgcg

SEQ ID NO: 1508 - protein, 890 aa, synthetic construct
  REGION 1..890: note = Variant of RNA polymerase
MHHHHHHMNTINIAKNDFSDIELAAIPFNTLADHYGERLAREQLALEHESYEMGEARFRKMFERQLKAGEVADNAAAKPLITTLLPKMIARINDWFEEVKAKRGKRPTAFQFLQEIKPEAVAYITIKTTLACLTSADNTTVQAVASAIGRAIEDEARFGRIRDLEAKHFKKNVEEQLNKRVGHVYKKAFMQVVEHDMLSKGLLGGEAWSSWHKEDSIHVGVRCIEMLIESTGMVSLHRQNAGVVGADSETIELAPEYAEAIATRAGALAGISPMFQPCVVPPKPWTGITGGGYWAAGRKPLQLVRTRSLAALRRYEEVSMPEVIKAVNIAQNTAWRINKKVLDVANTITQWQHCPVRDVPAMDRGEMPAKPLDIDTNEIALKAWKKAASAFYRRDKARMSRRLSMEFMLSQANKFANYEAIWFPQNMDWRGRVYAVPMFNPQGNDMTKGLLTFAQEKPIGEDGFYWLKIHGANTAGVDKVPFPQRIKFVEDNHTNIMECAKAPLENTWWAEQDSPFCFLAFCFEYAGVINSGLSYNCSLPLAFDGSCSGLQHFSAMLRDEIGGKAVNLLPSAEYQDIYRIVSDKVNEMLKQDLINGTSTTVETVTDKKTGEITQRTKYGTKVMAGWWLEHGVNRGVTKRPVMTLVYGSKEFGFRDQVLSDTIQPAIDNGKGDMFLNPNQAAGYMAKLIWNAVSGTVVAAVEAMNWLKSAAKLLAAEVKDEKTDTILRGRCAVHWVTPDGFPVWQEYKKPIQTRLNLMFLGQFRLQPTINTNKDSEIDARKQVSGIAPNFVHSLDGNHLRMTVVWAHEKYGIESFALIHDSFGTIPADAANLFKAVRETFVDTYESCDVLADFYDQIADQLHESQRDKMPALPAKGKLNLRDILKSDFAFA

SEQ ID NO: 1509 - DNA, 2670 bp, synthetic construct
  misc_feature 1..2670: note = Variant of RNA polymerase
  source 1..2670: mol_type = other DNA
atgcaccatcaccatcaccatatgaacacgattaacattgctaagaacgacttctctgacatcgaactggctgctatcccgttcaacactctggctgaccattacggtgagcgtttagctcgcgaacagttggcccttgagcatgagtcttacgagatgggtgaagcacgcttccgcaagatgtttgagcgtcaacttaaagctggtgaggttgcggataacgctgccgccaagcctctcatcactaccctactccctaagatgattgcacgcatcaacgactggtttgaggaagtgaaagctaagcgcggcaagcgcccgacagccttccagttcctgcaagaaatcaagccggaagccgtagcgtacatcaccattaagaccactctggcttgcctaaccagtgcggacaatacaaccgttcaggctgtagcaagcgcaatcggtcgggccattgaggacgaggctcgcttcggtcgtatccgtgaccttgaagctaagcacttcaagaagaacgttgaggaacaactcaacaagcgcgtagggcacgtctacaagaaagcatttatgcaagttgtcgagcacgacatgctctctaagggtctactcggtggcgaggcgtggtcttcgtggcataaggaagactctattcatgtaggagtacgctgcatcgagatgctcattgagtcaaccggaatggttagcttacaccgccaaaatgctggcgtagtgggtgcagactctgagactatcgaactcgcacctgaatacgctgaggctatcgcaacccgtgcaggtgcgctggctggcatctctccgatgttccaaccttgcgtagttcctcctaagccgtggactggcattactggtggtggctattgggctgcggggcgcaaacccctgcagttagtacgtactcgcagtctggcggcgcttcgccgctatgaagaagtgtcgatgccggaggtcatcaaagcagtcaacattgcgcagaatacagcatggcgtattaacaagaaagttctcgacgtagcgaataccatcacccaatggaagcactgtccagtcgcggatgtgcctgcgatggatcgtggcgaaatgccagctcgtccgttggacatcgataccaacgagattgcacttaaagcgtggaagaaagcggcttcggcgttctaccgcaaagacaaagcacgcatgagccgtcgtctgtcgatggagtttatgttatctcaggcgaacaagtttgcgaattatgaggcaatctggtttccgcaaaacatggattggcgtgggcgcgtgtacgctgtcccgatgttcaatcctcagggcaacgatatgacgaaaggcctgctgacctttgcgcaggagaaacccattggtgaagacggcttctattggctcaagattcatggcgcaaatacagctggagtggataaagtaccgtttccacaacgcatcaaatttgttgaggataaccatacgaatattatggaatgcgcgaaagcaccgctggaaaacacttggtgggcggaacaggactcgccgttctgctttctggcgttctgctttgagtatgctggcgtcatcaatagtggtctgtcgtacaactgtagcttgcctctggcatttgatggtagttgctccggcctgcaacatttctcagcgatgttacgcgacgaaattggcggcaaagctgtgaatctcctcccatctgcggaataccaggatatttatcgtatcgtcagcgacaaagttaacgagatgctgaaacaagatctgattaacggtacctctaccaccgtggaaacggtgactgataaaaagacaggcgaaattacccaacgcacgaaatacgggaccaaagttatggcacagtggtggttagcgcacggtgtgaaccgtggcgtcacgaaacgcccggttatgactttggtgtatgggagcaaagagtttggattccgcgatcaagtgctgagtgacaccattcaaccggcgatcgataacggcaagggtgacatgtttctgaatccgaatcaggctgctggttacatggcgaaactgatctggaacgcagtgtccgggaccgtagtcgcagcagttgaggcgatgaactggctgaaaagtgcggcgaaattacttgctgctgaagtgaaggatgagaagacggatacagttctgcgtggccgctgcgcagtacattgggtgactcccgacggcttccctgtgtggcaggaatacaagaagcctattcaaacgcgcttgaacctgatgttcctcggtcagttccgcttacagcctaccattaacaccaacaaagatagcgagattgatgcacgcaaacaggtgtctggtatcgctcctaactttgtacacagcctggacggtaaccaccttcgtatgactgtagtgtgggcacacgagaagtacggaatcgaatcttttgcactgattcacgactccttcggtaccattccggctgacgctgcgaacctgttcaaagcagtgcgcgaaactttcgttgacacatatgagtcttgtgatgtactggctgatttctacgaccagattgctgaccagttgcacgagtctcaacgcgacaaaatgccagcacttccggctaaaggtaagttgaacctccgtgacatcttaaaatcggacttcgcgttcgcg

SEQ ID NO: 1510 - protein, 890 aa, synthetic construct
  REGION 1..890: note = Variant of RNA polymerase
MHHHHHHMNTINIAKNDFSDIELAAIPFNTLADHYGERLAREQLALEHESYEMGEARFRKMFERQLKAGEVADNAAAKPLITTLLPKMIARINDWFEEVKAKRGKRPTAFQFLQEIKPEAVAYITIKTTLACLTSADNTTVQAVASAIGRAIEDEARFGRIRDLEAKHFKKNVEEQLNKRVGHVYKKAFMQVVEHDMLSKGLLGGEAWSSWHKEDSIHVGVRCIEMLIESTGMVSLHRQNAGVVGADSETIELAPEYAEAIATRAGALAGISPMFQPCVVPPKPWTGITGGGYWAAGRKPLQLVRTRSLAALRRYEEVSMPEVIKAVNIAQNTAWRINKKVLDVANTITQWKHCPVADVPAMDRGEMPARPLDIDTNEIALKAWKKAASAFYRKDKARMSRRLSMEFMLSQANKFANYEAIWFPQNMDWRGRVYAVPMFNPQGNDMTKGLLTFAQEKPIGEDGFYWLKIHGANTAGVDKVPFPQRIKFVEDNHTNIMECAKAPLENTWWAEQDSPFCFLAFCFEYAGVINSGLSYNCSLPLAFDGSCSGLQHFSAMLRDEIGGKAVNLLPSAEYQDIYRIVSDKVNEMLKQDLINGTSTTVETVTDKKTGEITQRTKYGTKVMAQWWLAHGVNRGVTKRPVMTLVYGSKEFGFRDQVLSDTIQPAIDNGKGDMFLNPNQAAGYMAKLIWNAVSGTVVAAVEAMNWLKSAAKLLAAEVKDEKTDTVLRGRCAVHWVTPDGFPVWQEYKKPIQTRLNLMFLGQFRLQPTINTNKDSEIDARKQVSGIAPNFVHSLDGNHLRMTVVWAHEKYGIESFALIHDSFGTIPADAANLFKAVRETFVDTYESCDVLADFYDQIADQLHESQRDKMPALPAKGKLNLRDILKSDFAFA

SEQ ID NO: 1511 - DNA, 2670 bp, synthetic construct
  misc_feature 1..2670: note = Variant of RNA polymerase
  source 1..2670: mol_type = other DNA
atgcaccatcaccatcaccatatgaacacgattaacattgctaagaacgacttctctgacatcgaactggctgctatcccgttcaacactctggctgaccattacggtgagcgtttagctcgcgaacagttggcccttgagcatgagtcttacgagatgggtgaagcacgcttccgcaagatgtttgagcgtcaacttaaagctggtgaggttgcggataacgctgccgccaagcctctcatcactaccctactccctaagatgattgcacgcatcaacgactggtttgaggaagtgaaagctaagcgcggcaagcgcccgacagccttccagttcctgcaagaaatcaagccggaagccgtagcgtacatcaccattaagaccactctggcttgcctaaccagtgcggacaatacaaccgttcaggctgtagcaagcgcaatcggtcgggccattgaggacgaggctcgcttcggtcgtatccgtgaccttgaagctaagcacttcaagaagaacgttgaggaacaactcaacaagcgcgtagggcacgtctacaagaaagcatttatgcaagttgtcgagcacgacatgctctctaagggtctactcggtggcgaggcgtggtcttcgtggcataaggaagactctattcatgtaggagtacgctgcatcgagatgctcattgagtcaaccggaatggttagcttacaccgccaaaatgctggcgtagtgggtgcagactctgagactatcgaactcgcacctgaatacgctgaggctatcgcaacccgtgcaggtgcgctggctggcatctctccgatgttccaaccttgcgtagttcctcctaagccgtggactggcattactggtggtggctattgggctgcggggcgcaaacccctgcagttagtacgtactcgcagtctggcggcgcttcgccgctatgaagaagtgtcgatgccggaggtcatcaaagcagtcaacattgcgcagaatacagcatggcgtattaacaagaaagttctcgacgtagcgaataccatcacccaatggcagcactgtccagtccgtgatgttcctgcgatggatcgtggcgaaatgccagctcgcccgttggacatcgataccaacgagattgcacttaaagcgtggaagaaagaagcttccgcgttctaccgcaaagacaaagcacgcatgagccgtcgtctgtcgatggagtttatgttatctcaggcgaacaagtttgcgaattatgaggcaatctggtttccgcaaaacatggattggcgtgggcgcgtgtacgctgtcccgatgttcaatcctcagggcaacgatatgacgaaaggcctgctgacctttgcgcaggagaaacccattggtgaagacggcttctattggctcaagattcatggcgcaaatacagctggagtggataaagtaccgtttccacaacgcatcaaatttgttgaggataaccatacgaatattatggaatgcgcgaaagcaccgctggaaaacacttggtgggcggaacaggactcgccgttctgctttctggcgttctgctttgagtatgctggcgtcatcaatagtggtctgtcgtacaactgtagcttgcctctggcatttgatggtagttgctccggcctgcaacatttctcagcgatgttacgcgacgaaattggcggcaaagctgtgaatctcctcccatctgcggaataccaggatatttatcgtatcgtcagcgacaaagttaacgagatgctgaaacaagatctgattaacggtacctctaccaccgtggaaacggtgactgataaaaagacaggcgaaattacccaacgcacgaaatacgggaccaaagttatggcacagtggtggttagaacacggtgtgaatcgtggcgtcacgaaacgcccggttatgactttggtgtatgggagcaaagagtttggattccgcgatcaagtgctgagtgacaccattcaaccggcgatcgataacggcaagggtgacatgtttctgaatccgaatcaggctgctggttacatggcgaaactgatctggaacgcagtgtccgggaccgtagtcgcagcagttgaggcgatgaactggctgaaaagtgcggcgaaattacttgctgctgaagtgaaggatgagaagacggatacagttctgcgtggccgctgcgcagtacattgggtgactcccgacggcttccctgtgtggcaggaatacaagaagcctattcaaacgcgcttgaacctgatgttcctcggtcagttccgcttacagcctaccattaacaccaacaaagatagcgagattgatgcacgcaaacaggtgtctggtatcgctcctaactttgtacacagcctggacggtaaccaccttcgtatgactgtagtgtgggcacacgagaagtacggaatcgaatcttttgcactgattcacgactccttcggtaccattccggctgacgctgcgaacctgttcaaagcagtgcgcgaaactttcgttgacacatatgagtcttgtgatgtactggctgatttctacgaccagattgctgaccagttgcacgagtctcaacgcgacaaaatgccagcacttccggctaaaggtaagttgaacctccgtgacatcttaaaatcggacttcgcgttcgcg

SEQ ID NO: 1512 - protein, 890 aa, synthetic construct
  REGION 1..890: note = Variant of RNA polymerase
MHHHHHHMNTINIAKNDFSDIELAAIPFNTLADHYGERLAREQLALEHESYEMGEARFRKMFERQLKAGEVADNAAAKPLITTLLPKMIARINDWFEEVKAKRGKRPTAFQFLQEIKPEAVAYITIKTTLACLTSADNTTVQAVASAIGRAIEDEARFGRIRDLEAKHFKKNVEEQLNKRVGHVYKKAFMQVVEHDMLSKGLLGGEAWSSWHKEDSIHVGVRCIEMLIESTGMVSLHRQNAGVVGADSETIELAPEYAEAIATRAGALAGISPMFQPCVVPPKPWTGITGGGYWAAGRKPLQLVRTRSLAALRRYEEVSMPEVIKAVNIAQNTAWRINKKVLDVANTITQWQHCPVRDVPAMDRGEMPARPLDIDTNEIALKAWKKEASAFYRKDKARMSRRLSMEFMLSQANKFANYEAIWFPQNMDWRGRVYAVPMFNPQGNDMTKGLLTFAQEKPIGEDGFYWLKIHGANTAGVDKVPFPQRIKFVEDNHTNIMECAKAPLENTWWAEQDSPFCFLAFCFEYAGVINSGLSYNCSLPLAFDGSCSGLQHFSAMLRDEIGGKAVNLLPSAEYQDIYRIVSDKVNEMLKQDLINGTSTTVETVTDKKTGEITQRTKYGTKVMAQWWLEHGVNRGVTKRPVMTLVYGSKEFGFRDQVLSDTIQPAIDNGKGDMFLNPNQAAGYMAKLIWNAVSGTVVAAVEAMNWLKSAAKLLAAEVKDEKTDTVLRGRCAVHWVTPDGFPVWQEYKKPIQTRLNLMFLGQFRLQPTINTNKDSEIDARKQVSGIAPNFVHSLDGNHLRMTVVWAHEKYGIESFALIHDSFGTIPADAANLFKAVRETFVDTYESCDVLADFYDQIADQLHESQRDKMPALPAKGKLNLRDILKSDFAFA

SEQ ID NO: 1513 - DNA, 2670 bp, synthetic construct
  misc_feature 1..2670: note = Variant of RNA polymerase
  source 1..2670: mol_type = other DNA
atgcaccatcaccatcaccatatgaacacgattaacattgctaagaacgacttctctgacatcgaactggctgctatcccgttcaacactctggctgaccattacggtgagcgtttagctcgcgaacagttggcccttgagcatgagtcttacgagatgggtgaagcacgcttccgcaagatgtttgagcgtcaacttaaagctggtgaggttgcggataacgctgccgccaagcctctcatcactaccctactccctaagatgattgcacgcatcaacgactggtttgaggaagtgaaagctaagcgcggcaagcgcccgacagccttccagttcctgcaagaaatcaagccggaagccgtagcgtacatcaccattaagaccactctggcttgcctaaccagtgcggacaatacaaccgttcaggctgtagcaagcgcaatcggtcgggccattgaggacgaggctcgcttcggtcgtatccgtgaccttgaagctaagcacttcaagaagaacgttgaggaacaactcaacaagcgcgtagggcacgtctacaagaaagcatttatgcaagttgtcgagcacgacatgctctctaagggtctactcggtggcgaggcgtggtcttcgtggcataaggaagactctattcatgtaggagtacgctgcatcgagatgctcattgagtcaaccggaatggttagcttacaccgccaaaatgctggcgtagtgggtgcagactctgagactatcgaactcgcacctgaatacgctgaggctatcgcaacccgtgcaggtgcgctggctggcatctctccgatgttccaaccttgcgtagttcctcctaagccgtggactggcattactggtggtggctattgggctgcggggcgcaaacccctgcagttagtacgtactcgcagtctgaaggcgcttcgccgctatgaagaagtgtcgatgccggaggtcatcaaagcagtcaacattgcgcagaatacagcatggcgtattaacaagaaagttctcgacgtagcgaataccatcacccaatggcagcactgtccagtccgtgatattcctgcgatggatcgtggcgaaatgccagctcgcccgttggacatcgataccaacgagattgcacttaaagcgtggaagaaagcggctgcggcgttctaccgcaaagacaaagcacgcatgagccgtcgtctgtcgatggagtttatgttatctcaggcgaacaagtttgcgaattatgaggcaatctggtttccgcaaaacatggattggcgtgggcgcgtgtacgctgtcccgatgttcaatcctcagggcaacgatatgacgaaaggcctgctgacctttgcgcaggagaaacccattggtgaagacggcttctattggctcaagattcatggcgcaaatacagctggagtggataaagtaccgtttccacaacgcatcaaatttattgaggataaccatacgaatattatggaatgcgcgaaagcaccgctggaaaacacttggtgggcggaacaggactcgccgttctgctttctggcgttctgctttgagtatgctggcgtcatcaatagtggtctgtcgtacaactgtagcttgcctctggcatttgatggtagttgctccggcctgcaacatttctcagcgatgttacgcgacgaagttggcggcaaagctgtgaatctcctcccatctgcggaataccaggatatttatcgtatcgtcagcgacaaagttaacgagatgctgaaacaagatctgattaacggtacctctaccaccgtggaaacggtgactgataaaaagacaggcgaaattacccaacgcacgaaatacgggaccaaagttatggcagggtggtggttagaacacggtgtgaatcgtggcgtcacgaaacgcccggttatgactttggtgtatgggagcaaagagtttggattccgcgatcaagtgctgagtgacaccattcaaccggcgatcgataacggcaagggtgacatgtttctgaatccgaatcaggctgctggttacatggcgaaactgatctggaacgcggtgtccgggaccgtagtcgcagcagttgaggcgatgaactggctgaaaagtgcggcgaaattacttgctgctgaagtgaaggatgagaagacggatacagttctgcgtggccgctgcgcagtacattgggtgactcccgacggcttccctgtgtggcaggaatacaagaagcctattcaaacgcgcttgaacctgatgttcctcggtcagttccgcttacagcctaccattaacaccaacaaagatagcgagattgatgcacgcaaacaggtgtctggtatcgctcctaactttgtacacagcctggacggtaaccaccttcgtatgactgtagtgtgggcacacgagaagtacggaatcgaatcttttgcactgattcacgactccttcggtaccattccggctgacgctgcgaacctgttcaaagcagtgcgcgaaactttcgttgacacatatgagtcttgtgatgtactggctgatttctacgaccagattgctgaccagttgcacgagtctcaacgcgacaaaatgccagcacttccggctaaaggtaagttgaacctccgtgacatcttaaaatcggacttcgcgttcgcg

SEQ ID NO: 1514 - protein, 890 aa, synthetic construct
  REGION 1..890: note = Variant of RNA polymerase
MHHHHHHMNTINIAKNDFSDIELAAIPFNTLADHYGERLAREQLALEHESYEMGEARFRKMFERQLKAGEVADNAAAKPLITTLLPKMIARINDWFEEVKAKRGKRPTAFQFLQEIKPEAVAYITIKTTLACLTSADNTTVQAVASAIGRAIEDEARFGRIRDLEAKHFKKNVEEQLNKRVGHVYKKAFMQVVEHDMLSKGLLGGEAWSSWHKEDSIHVGVRCIEMLIESTGMVSLHRQNAGVVGADSETIELAPEYAEAIATRAGALAGISPMFQPCVVPPKPWTGITGGGYWAAGRKPLQLVRTRSLKALRRYEEVSMPEVIKAVNIAQNTAWRINKKVLDVANTITQWQHCPVRDIPAMDRGEMPARPLDIDTNEIALKAWKKAAAAFYRKDKARMSRRLSMEFMLSQANKFANYEAIWFPQNMDWRGRVYAVPMFNPQGNDMTKGLLTFAQEKPIGEDGFYWLKIHGANTAGVDKVPFPQRIKFIEDNHTNIMECAKAPLENTWWAEQDSPFCFLAFCFEYAGVINSGLSYNCSLPLAFDGSCSGLQHFSAMLRDEVGGKAVNLLPSAEYQDIYRIVSDKVNEMLKQDLINGTSTTVETVTDKKTGEITQRTKYGTKVMAGWWLEHGVNRGVTKRPVMTLVYGSKEFGFRDQVLSDTIQPAIDNGKGDMFLNPNQAAGYMAKLIWNAVSGTVVAAVEAMNWLKSAAKLLAAEVKDEKTDTVLRGRCAVHWVTPDGFPVWQEYKKPIQTRLNLMFLGQFRLQPTINTNKDSEIDARKQVSGIAPNFVHSLDGNHLRMTVVWAHEKYGIESFALIHDSFGTIPADAANLFKAVRETFVDTYESCDVLADFYDQIADQLHESQRDKMPALPAKGKLNLRDILKSDFAFA

SEQ ID NO: 1515 - DNA, 2670 bp, synthetic construct
  misc_feature 1..2670: note = Variant of RNA polymerase
  source 1..2670: mol_type = other DNA
atgcaccatcaccatcaccatatgaacacgattaacattgctaagaacgacttctctgacatcgaactggctgctatcccgttcaacactctggctgaccattacggtgagcgtttagctcgcgaacagttggcccttgagcatgagtcttacgagatgggtgaagcacgcttccgcaagatgtttgagcgtcaacttaaagctggtgaggttgcggataacgctgccgccaagcctctcatcactaccctactccctaagatgattgcacgcatcaacgactggtttgaggaagtgaaagctaagcgcggcaagcgcccgacagccttccagttcctgcaagaaatcaagccggaagccgtagcgtacatcaccattaagaccactctggcttgcctaaccagtgcggacaatacaaccgttcaggctgtagcaagcgcaatcggtcgggccattgaggacgaggctcgcttcggtcgtatccgtgaccttgaagctaagcacttcaagaagaacgttgaggaacaactcaacaagcgcgtagggcacgtctacaagaaagcatttatgcaagttgtcgagcacgacatgctctctaagggtctactcggtggcgaggcgtggtcttcgtggcataaggaagactctattcatgtaggagtacgctgcatcgagatgctcattgagtcaaccggaatggttagcttacaccgccaaaatgctggcgtagtgggtgcagactctgagactatcgaactcgcacctgaatacgctgaggctatcgcaacccgtgcaggtgcgctggctggcatctctccgatgttccaaccttgcgtagttcctcctaagccgtggactggcattactggtggtggctattgggctgcggggcgcaaacccctgcagttagtacgtactcgcagtctgaaggcgcttcgccgctatgaagaagtgtcgatgccggaggtcatcaaagcagtcaacattgcgcagaatacagcatggcgtattaacaagaaagttctcgacgtagcgaataccatcacccaatggcagcactgtccagtccgtgatgttcctgcgatggatcgtggcgaaatgccagctcgtccgttggacatcgataccaacgagattgcacttaaagcgtggaagaaagaagcttccgcgttctaccgcaaagacaaagcacgcatgagccgtcgtctgtcgatggagtttatgttatctcaggcgaacaagtttgcgaattatgaggcaatctggtttccgcaaaacatggattggcgtgggcgcgtgtacgctgtcccgatgttcaatcctcagggcaacgatatgacgaaaggcctgctgacctttgcgcaggagaaacccattggtgaagacggcttctattggctcaagattcatggcgcaaatacagctggagtggataaagtaccgtttccacaacgcatcaaatttgttgaggataaccatacgaatattatggaatgcgcgaaagcaccgctggaaaacacttggtgggcggaacaggactcgccgttctgctttctggcgttctgctttgagtatgctggcgtcatcaatagtggtctgtcgtacaactgtagcttgcctctggcatttgatggtagttgctccggcctgcaacatttctcagcgatgttacgcgacgaaattggcggcaaagctgtgaatctcctcccatctgcggaataccaggatatttatcgtatcgtcagcgacaaagttaacgagatgctgaaacaagatctgattaacggtacctctaccaccgtggaaacggtgactgataaaaagacaggcgaaattacccaacgcacgaaatacgggaccaaagttatggcacagtggtggttagaacacggtgtgaatcgtggcgtcacgaaacgcccggttatgactttggtgtatgggagcaaagagtttggattccgcgatcaagtgctgagtgacaccattcaaccggcgatcgataacggcaagggtgacatgtttctgaatccgaatcaggctgctggttacatggcgaaactgatctggaacgcagtgtccgggaccgtagtcgcagcagttgaggcgatgaactggctgaaaagtgcggcgaaattacttgctgctgaagtgaaggatgagaagacggatacagttctgcgtggccgctgcgcagtacattgggtgactcccgacggcttccctgtgtggcaggaatacaagaagcctattcaaacgcgcttgaacctgatgttcctcggtcagttccgcttacagcctaccattaacaccaacaaagatagcgagattgatgcacgcaaacaggtgtctggtatcgctcctaactttgtacacagcctggacggtaaccaccttcgtatgactgtagtgtgggcacacgagaagtacggaatcgaatcttttgcactgattcacgactccttcggtaccattccggctgacgctgcgaacctgttcaaagcagtgcgcgaaactttcgttgacacatatgagtcttgtgatgtactggctgatttctacgaccagattgctgaccagttgcacgagtctcaacgcgacaaaatgccagcacttccggctaaaggtaagttgaacctccgtgacatcttaaaatcggacttcgcgttcgcg

SEQ ID NO: 1516 - protein, 890 aa, synthetic construct
  REGION 1..890: note = Variant of RNA polymerase
MHHHHHHMNTINIAKNDFSDIELAAIPFNTLADHYGERLAREQLALEHESYEMGEARFRKMFERQLKAGEVADNAAAKPLITTLLPKMIARINDWFEEVKAKRGKRPTAFQFLQEIKPEAVAYITIKTTLACLTSADNTTVQAVASAIGRAIEDEARFGRIRDLEAKHFKKNVEEQLNKRVGHVYKKAFMQVVEHDMLSKGLLGGEAWSSWHKEDSIHVGVRCIEMLIESTGMVSLHRQNAGVVGADSETIELAPEYAEAIATRAGALAGISPMFQPCVVPPKPWTGITGGGYWAAGRKPLQLVRTRSLKALRRYEEVSMPEVIKAVNIAQNTAWRINKKVLDVANTITQWQHCPVRDVPAMDRGEMPARPLDIDTNEIALKAWKKEASAFYRKDKARMSRRLSMEFMLSQANKFANYEAIWFPQNMDWRGRVYAVPMFNPQGNDMTKGLLTFAQEKPIGEDGFYWLKIHGANTAGVDKVPFPQRIKFVEDNHTNIMECAKAPLENTWWAEQDSPFCFLAFCFEYAGVINSGLSYNCSLPLAFDGSCSGLQHFSAMLRDEIGGKAVNLLPSAEYQDIYRIVSDKVNEMLKQDLINGTSTTVETVTDKKTGEITQRTKYGTKVMAQWWLEHGVNRGVTKRPVMTLVYGSKEFGFRDQVLSDTIQPAIDNGKGDMFLNPNQAAGYMAKLIWNAVSGTVVAAVEAMNWLKSAAKLLAAEVKDEKTDTVLRGRCAVHWVTPDGFPVWQEYKKPIQTRLNLMFLGQFRLQPTINTNKDSEIDARKQVSGIAPNFVHSLDGNHLRMTVVWAHEKYGIESFALIHDSFGTIPADAANLFKAVRETFVDTYESCDVLADFYDQIADQLHESQRDKMPALPAKGKLNLRDILKSDFAFA

SEQ ID NO: 1517 - DNA, 2670 bp, synthetic construct
  misc_feature 1..2670: note = Variant of RNA polymerase
  source 1..2670: mol_type = other DNA
atgcaccatcaccatcaccatatgaacacgattaacattgctaagaacgacttctctgacatcgaactggctgctatcccgttcaacactctggctgaccattacggtgagcgtttagctcgcgaacagttggcccttgagcatgagtcttacgagatgggtgaagcacgcttccgcaagatgtttgagcgtcaacttaaagctggtgaggttgcggataacgctgccgccaagcctctcatcactaccctactccctaagatgattgcacgcatcaacgactggtttgaggaagtgaaagctaagcgcggcaagcgcccgacagccttccagttcctgcaagaaatcaagccggaagccgtagcgtacatcaccattaagaccactctggcttgcctaaccagtgcggacaatacaaccgttcaggctgtagcaagcgcaatcggtcgggccattgaggacgaggctcgcttcggtcgtatccgtgaccttgaagctaagcacttcaagaagaacgttgaggaacaactcaacaagcgcgtagggcacgtctacaagaaagcatttatgcaagttgtcgagcacgacatgctctctaagggtctactcggtggcgaggcgtggtcttcgtggcataaggaagactctattcatgtaggagtacgctgcatcgagatgctcattgagtcaaccggaatggttagcttacaccgccaaaatgctggcgtagtgggtgcagactctgagactatcgaactcgcacctgaatacgctgaggctatcgcaacccgtgcaggtgcgctggctggcatctctccgatgttccaaccttgcgtagttcctcctaagccgtggactggcattactggtggtggctattgggctgcggggcgcaaacccctgcagttagtacgtactcgcagtctgaaggcgcttcgccgctatgaagaagtgtcgatgccggaggtcatcaaagcagtcaacattgcgcagaatacagcatggcgtattaacaagaaagttctcgacgtagcgaataccatcacccaatggaagcactgtccagtccgtgatattcctgcgatggatcgtggcgaaatgccagctcgtccgttggacatcgataccaacgagattgcacttaaagcgtggaagaaagaagcttccgcgttctaccgcaaagacaaagcacgcatgagccgtcgtctgtcgatggagtttatgttatctcaggcgaacaagtttgcgaattatgaggcaatctggtttccgcaaaacatggattggcgtgggcgcgtgtacgctgtcccgatgttcaatcctcagggcaacgatatgacgaaaggcctgctgacctttgcgcaggagaaacccattggtgaagacggcttctattggctcaagattcatggcgcaaatacagctggagtggataaagtaccgtttccacaacgcatcaaatttgttgaggataaccatacgaatattatggaatgcgcgaaagcaccgctggaaaacacttggtgggcggaacaggactcgccgttctgctttctggcgttctgctttgagtatgctggcgtcatcaatagtggtctgtcgtacaactgtagcttgcctctggcatttgatggtagttgctccggcctgcaacatttctcagcgatgttacgcgacgaaattggcggcaaagctgtgaatctcctcccatctgcggaataccaggatatttatcgtatcgtcagcgacaaagttaacgagatgctgaaacaagatctgattaacggtacctctaccaccgtggaaacggtgactgataaaaagacaggcgaaattacccaacgcacgaaatacgggaccaaagttatggcacaatggtggttagaacacggtgtgaaccgtggcgtcacgaaacgcccggttatgactttggtgtatgggagcaaagagtttggattccgcgatcaagtgctgagtgacaccattcaaccggcgatcgataacggcaagggtgacatgtttctgaatccgaatcaggctgctggttacatggcgaaactgatctggaacgcagtgtccgggaccgtagtcgcagcagttgaggcgatgaactggctgaaaagtgcggcgaaattacttgctgctgaagtgaaggatgagaagacggatacaattctgcgtggccgctgcgcagtacattgggtgactcccgacggcttccctgtgtggcaggaatacaagaagcctattcaaacgcgcttgaacctgatgttcctcggtcagttccgcttacagcctaccattaacaccaacaaagatagcgagattgatgcacgcaaacaggtgtctggtatcgctcctaactttgtacacagcctggacggtaaccaccttcgtatgactgtagtgtgggcacacgagaagtacggaatcgaatcttttgcactgattcacgactccttcggtaccattccggctgacgctgcgaacctgttcaaagcagtgcgcgaaactttcgttgacacatatgagtcttgtgatgtactggctgatttctacgaccagattgctgaccagttgcacgagtctcaacgcgacaaaatgccagcacttccggctaaaggtaagttgaacctccgtgacatcttaaaatcggacttcgcgttcgcg

SEQ ID NO: 1518 - protein, 890 aa, synthetic construct
  REGION 1..890: note = Variant of RNA polymerase
MHHHHHHMNTINIAKNDFSDIELAAIPFNTLADHYGERLAREQLALEHESYEMGEARFRKMFERQLKAGEVADNAAAKPLITTLLPKMIARINDWFEEVKAKRGKRPTAFQFLQEIKPEAVAYITIKTTLACLTSADNTTVQAVASAIGRAIEDEARFGRIRDLEAKHFKKNVEEQLNKRVGHVYKKAFMQVVEHDMLSKGLLGGEAWSSWHKEDSIHVGVRCIEMLIESTGMVSLHRQNAGVVGADSETIELAPEYAEAIATRAGALAGISPMFQPCVVPPKPWTGITGGGYWAAGRKPLQLVRTRSLKALRRYEEVSMPEVIKAVNIAQNTAWRINKKVLDVANTITQWKHCPVRDIPAMDRGEMPARPLDIDTNEIALKAWKKEASAFYRKDKARMSRRLSMEFMLSQANKFANYEAIWFPQNMDWRGRVYAVPMFNPQGNDMTKGLLTFAQEKPIGEDGFYWLKIHGANTAGVDKVPFPQRIKFVEDNHTNIMECAKAPLENTWWAEQDSPFCFLAFCFEYAGVINSGLSYNCSLPLAFDGSCSGLQHFSAMLRDEIGGKAVNLLPSAEYQDIYRIVSDKVNEMLKQDLINGTSTTVETVTDKKTGEITQRTKYGTKVMAQWWLEHGVNRGVTKRPVMTLVYGSKEFGFRDQVLSDTIQPAIDNGKGDMFLNPNQAAGYMAKLIWNAVSGTVVAAVEAMNWLKSAAKLLAAEVKDEKTDTILRGRCAVHWVTPDGFPVWQEYKKPIQTRLNLMFLGQFRLQPTINTNKDSEIDARKQVSGIAPNFVHSLDGNHLRMTVVWAHEKYGIESFALIHDSFGTIPADAANLFKAVRETFVDTYESCDVLADFYDQIADQLHESQRDKMPALPAKGKLNLRDILKSDFAFA

SEQ ID NO: 1519 - DNA, 2670 bp, synthetic construct
  misc_feature 1..2670: note = Variant of RNA polymerase
  source 1..2670: mol_type = other DNA
atgcaccatcaccatcaccatatgaacacgattaacattgctaagaacgacttctctgacatcgaactggctgctatcccgttcaacactctggctgaccattacggtgagcgtttagctcgcgaacagttggcccttgagcatgagtcttacgagatgggtgaagcacgcttccgcaagatgtttgagcgtcaacttaaagctggtgaggttgcggataacgctgccgccaagcctctcatcactaccctactccctaagatgattgcacgcatcaacgactggtttgaggaagtgaaagctaagcgcggcaagcgcccgacagccttccagttcctgcaagaaatcaagccggaagccgtagcgtacatcaccattaagaccactctggcttgcctaaccagtgcggacaatacaaccgttcaggctgtagcaagcgcaatcggtcgggccattgaggacgaggctcgcttcggtcgtatccgtgaccttgaagctaagcacttcaagaagaacgttgaggaacaactcaacaagcgcgtagggcacgtctacaagaaagcatttatgcaagttgtcgagcacgacatgctctctaagggtctactcggtggcgaggcgtggtcttcgtggcataaggaagactctattcatgtaggagtacgctgcatcgagatgctcattgagtcaaccggaatggttagcttacaccgccaaaatgctggcgtagtgggtgcagactctgagactatcgaactcgcacctgaatacgctgaggctatcgcaacccgtgcaggtgcgctggctggcatctctccgatgttccaaccttgcgtagttcctcctaagccgtggactggcattactggtggtggctattgggctgcggggcgcaaacccctgcagttagtacgtactcgcagtctggcggcgcttcgccgctatgaagaagtgtcgatgccggaggtcatcaaagcagtcaacattgcgcagaatacagcatggcgtattaacaagaaagttctcgacgtagcgaataccatcacccaatggaagcactgtccagtccgtgatgtgcctgcgatcgatcgtggcgaaatgccagctcgcccgttggacatcgataccaacgagattgcacttaaagcgtggaagaaagaagcttccgcgttctaccgcaaagacaaagcacgcatgagccgtcgtctgtcgatggagtttatgttatctcaggcgaacaagtttgcgaattatgaggcaatctggtttccgcaaaacatggattggcgtgggcgcgtgtacgctgtcccgatgttcaatcctcagggcaacgatatgacgaaaggcctgctgacctttgcgcaggagaaacccattggtgaagacggcttctattggctcaagattcatggcgcaaatacagctggagtggataaagtaccgtttccacaacgcatcaaatttgttgaggataaccatacgaatattatggaatgcgcgaaagcaccgctggaaaacacttggtgggcggaacaggactcgccgttctgctttctggcgttctgctttgagtatgctggcgtcatcaatagtggtctgtcgtacaactgtagcttgcctctggcatttgatggtagttgctccggcctgcaacatttctcagcgatgttacgcgacgaagttggcggcaaagctgtgaatctcctcccatctgcggaataccaggatatttatcgtatcgtcagcgacaaagttaacgagatgctgaaacaagatctgattaacggtacctctaccaccgtggaaacggtgactgataaaaagacaggcgaaattacccaacgcacgaaatacgggaccaaagttatggcacagtggtggttagaacacggtgtgaatcgtggcgtcacgaaacgcccggttatgactttggtgtatgggagcaaagagtttggattccgcgatcaagtgctgagtgacaccattcaaccggcgatcgataacggcaagggtgacatgtttctgaatccgaatcaggctgctggttacatggcgaaactgatctggaacgcagtgtccgggaccgtagtcgcagcagttgaggcgatgaactggctgaaaagtgcggcgaaattacttgctgctgaagtgaaggatgagaagacggatacaattctgcgtggccgctgcgcagtacattgggtgactcccgacggcttccctgtgtggcaggaatacaagaagcctattcaaacgcgcttgaacctgatgttcctcggtcagttccgcttacagcctaccattaacaccaacaaagatagcgagattgatgcacgcaaacaggtgtctggtatcgctcctaactttgtacacagcctggacggtaaccaccttcgtatgactgtagtgtgggcacacgagaagtacggaatcgaatcttttgcactgattcacgactccttcggtaccattccggctgacgctgcgaacctgttcaaagcagtgcgcgaaactttcgttgacacatatgagtcttgtgatgtactggctgatttctacgaccagattgctgaccagttgcacgagtctcaacgcgacaaaatgccagcacttccggctaaaggtaagttgaacctccgtgacatcttaaaatcggacttcgcgttcgcg

SEQ ID NO: 1520 - protein, 890 aa, synthetic construct
  REGION 1..890: note = Variant of RNA polymerase
MHHHHHHMNTINIAKNDFSDIELAAIPFNTLADHYGERLAREQLALEHESYEMGEARFRKMFERQLKAGEVADNAAAKPLITTLLPKMIARINDWFEEVKAKRGKRPTAFQFLQEIKPEAVAYITIKTTLACLTSADNTTVQAVASAIGRAIEDEARFGRIRDLEAKHFKKNVEEQLNKRVGHVYKKAFMQVVEHDMLSKGLLGGEAWSSWHKEDSIHVGVRCIEMLIESTGMVSLHRQNAGVVGADSETIELAPEYAEAIATRAGALAGISPMFQPCVVPPKPWTGITGGGYWAAGRKPLQLVRTRSLAALRRYEEVSMPEVIKAVNIAQNTAWRINKKVLDVANTITQWKHCPVRDVPAIDRGEMPARPLDIDTNEIALKAWKKEASAFYRKDKARMSRRLSMEFMLSQANKFANYEAIWFPQNMDWRGRVYAVPMFNPQGNDMTKGLLTFAQEKPIGEDGFYWLKIHGANTAGVDKVPFPQRIKFVEDNHTNIMECAKAPLENTWWAEQDSPFCFLAFCFEYAGVINSGLSYNCSLPLAFDGSCSGLQHFSAMLRDEVGGKAVNLLPSAEYQDIYRIVSDKVNEMLKQDLINGTSTTVETVTDKKTGEITQRTKYGTKVMAQWWLEHGVNRGVTKRPVMTLVYGSKEFGFRDQVLSDTIQPAIDNGKGDMFLNPNQAAGYMAKLIWNAVSGTVVAAVEAMNWLKSAAKLLAAEVKDEKTDTILRGRCAVHWVTPDGFPVWQEYKKPIQTRLNLMFLGQFRLQPTINTNKDSEIDARKQVSGIAPNFVHSLDGNHLRMTVVWAHEKYGIESFALIHDSFGTIPADAANLFKAVRETFVDTYESCDVLADFYDQIADQLHESQRDKMPALPAKGKLNLRDILKSDFAFA

SEQ ID NO: 1521 - DNA, 2670 bp, synthetic construct
  misc_feature 1..2670: note = Variant of RNA polymerase
  source 1..2670: mol_type = other DNA
atgcaccatcaccatcaccatatgaacacgattaacattgctaagaacgacttctctgacatcgaactggctgctatcccgttcaacactctggctgaccattacggtgagcgtttagctcgcgaacagttggcccttgagcatgagtcttacgagatgggtgaagcacgcttccgcaagatgtttgagcgtcaacttaaagctggtgaggttgcggataacgctgccgccaagcctctcatcactaccctactccctaagatgattgcacgcatcaacgactggtttgaggaagtgaaagctaagcgcggcaagcgcccgacagccttccagttcctgcaagaaatcaagccggaagccgtagcgtacatcaccattaagaccactctggcttgcctaaccagtgcggacaatacaaccgttcaggctgtagcaagcgcaatcggtcgggccattgaggacgaggctcgcttcggtcgtatccgtgaccttgaagctaagcacttcaagaagaacgttgaggaacaactcaacaagcgcgtagggcacgtctacaagaaagcatttatgcaagttgtcgagcacgacatgctctctaagggtctactcggtggcgaggcgtggtcttcgtggcataaggaagactctattcatgtaggagtacgctgcatcgagatgctcattgagtcaaccggaatggttagcttacaccgccaaaatgctggcgtagtgggtgcagactctgagactatcgaactcgcacctgaatacgctgaggctatcgcaacccgtgcaggtgcgctggctggcatctctccgatgttccaaccttgcgtagttcctcctaagccgtggactggcattactggtggtggctattgggctgcggggcgcaaacccctgcagttagtacgtactcgcagtctggcggcgcttcgccgctatgaagaagtgtcgatgccggaggtcatcaaagcagtcaacattgcgcagaatacagcatggcgtattaacaagaaagttctcgacgtagcgaataccatcacccaatggcagcactgtccagtccgtgatattcctgcgatggatcgtggcgaaatgccagctaagccgttggacatcgataccaacgagattgcacttaaagcgtggaagaaagaagcttccgcgttctaccgcaaagacaaagcacgcatgagccgtcgtctgtcgatggagtttatgttatctcaggcgaacaagtttgcgaattatgaggcaatctggtttccgcaaaacatggattggcgtgggcgcgtgtacgctgtcccgatgttcaatcctcagggcaacgatatgacgaaaggcctgctgacctttgcgcaggagaaacccattggtgaagacggcttctattggctcaagattcatggcgcaaatacagctggagtggataaagtaccgtttccacaacgcatcaaatttgttgaggataaccatacgaatattatggaatgcgcgaaagcaccgctggaaaacacttggtgggcggaacaggactcgccgttctgctttctggcgttctgctttgagtatgctggcgtcatcaatagtggtctgtcgtacaactgtagcttgcctctggcatttgatggtagttgctccggcctgcaacatttctcagcgatgttacgcgacgaaattggcggcaaagctgtgaatctcctcccatctgcggaataccaggatatttatcgtatcgtcagcgacaaagttaacgagatgctgaaacaagatctgattaacggtacctctaccaccgtggaaacggtgactgataaaaagacaggcgaaattacccaacgcacgaaatacgggaccaaagttatggcacagtggtggttagaacacggtgtgaatcgtggcgtcacgaaacgcccggttatgactttggtgtatgggagcaaagagtttggattccgcgatcaagtgctgagtgacaccattcaaccggcgatcgataacggcaagggtgacatgtttctgaatccgaatcaggctgctggttacatggcgaaactgatctggaacgcagtgtccgggaccgtagtcgcagcagttgaggcgatgaactggctgaaaagtgcggcgaaattacttgctgctgaagtgaaggatgagaagacggatacagttctgcgtggccgctgcgcagtacattgggtgactcccgacggcttccctgtgtggcaggaatacaagaagcctattcaaacgcgcttgaacctgatgttcctcggtcagttccgcttacagcctaccattaacaccaacaaagatagcgagattgatgcacgcaaacaggtgtctggtatcgctcctaactttgtacacagcctggacggtaaccaccttcgtatgactgtagtgtgggcacacgagaagtacggaatcgaatcttttgcactgattcacgactccttcggtaccattccggctgacgctgcgaacctgttcaaagcagtgcgcgaaactttcgttgacacatatgagtcttgtgatgtactggctgatttctacgaccagattgctgaccagttgcacgagtctcaacgcgacaaaatgccagcacttccggctaaaggtaagttgaacctccgtgacatcttaaaatcggacttcgcgttcgcg

SEQ ID NO: 1522 - protein, 890 aa, synthetic construct
  REGION 1..890: note = Variant of RNA polymerase
MHHHHHHMNTINIAKNDFSDIELAAIPFNTLADHYGERLAREQLALEHESYEMGEARFRKMFERQLKAGEVADNAAAKPLITTLLPKMIARINDWFEEVKAKRGKRPTAFQFLQEIKPEAVAYITIKTTLACLTSADNTTVQAVASAIGRAIEDEARFGRIRDLEAKHFKKNVEEQLNKRVGHVYKKAFMQVVEHDMLSKGLLGGEAWSSWHKEDSIHVGVRCIEMLIESTGMVSLHRQNAGVVGADSETIELAPEYAEAIATRAGALAGISPMFQPCVVPPKPWTGITGGGYWAAGRKPLQLVRTRSLAALRRYEEVSMPEVIKAVNIAQNTAWRINKKVLDVANTITQWQHCPVRDIPAMDRGEMPAKPLDIDTNEIALKAWKKEASAFYRKDKARMSRRLSMEFMLSQANKFANYEAIWFPQNMDWRGRVYAVPMFNPQGNDMTKGLLTFAQEKPIGEDGFYWLKIHGANTAGVDKVPFPQRIKFVEDNHTNIMECAKAPLENTWWAEQDSPFCFLAFCFEYAGVINSGLSYNCSLPLAFDGSCSGLQHFSAMLRDEIGGKAVNLLPSAEYQDIYRIVSDKVNEMLKQDLINGTSTTVETVTDKKTGEITQRTKYGTKVMAQWWLEHGVNRGVTKRPVMTLVYGSKEFGFRDQVLSDTIQPAIDNGKGDMFLNPNQAAGYMAKLIWNAVSGTVVAAVEAMNWLKSAAKLLAAEVKDEKTDTVLRGRCAVHWVTPDGFPVWQEYKKPIQTRLNLMFLGQFRLQPTINTNKDSEIDARKQVSGIAPNFVHSLDGNHLRMTVVWAHEKYGIESFALIHDSFGTIPADAANLFKAVRETFVDTYESCDVLADFYDQIADQLHESQRDKMPALPAKGKLNLRDILKSDFAFA

SEQ ID NO: 1523 - DNA, 2670 bp, synthetic construct
  misc_feature 1..2670: note = Variant of RNA polymerase
  source 1..2670: mol_type = other DNA
atgcaccatcaccatcaccatatgaacacgattaacattgctaagaacgacttctctgacatcgaactggctgctatcccgttcaacactctggctgaccattacggtgagcgtttagctcgcgaacagttggcccttgagcatgagtcttacgagatgggtgaagcacgcttccgcaagatgtttgagcgtcaacttaaagctggtgaggttgcggataacgctgccgccaagcctctcatcactaccctactccctaagatgattgcacgcatcaacgactggtttgaggaagtgaaagctaagcgcggcaagcgcccgacagccttccagttcctgcaagaaatcaagccggaagccgtagcgtacatcaccattaagaccactctggcttgcctaaccagtgcggacaatacaaccgttcaggctgtagcaagcgcaatcggtcgggccattgaggacgaggctcgcttcggtcgtatccgtgaccttgaagctaagcacttcaagaagaacgttgaggaacaactcaacaagcgcgtagggcacgtctacaagaaagcatttatgcaagttgtcgagcacgacatgctctctaagggtctactcggtggcgaggcgtggtcttcgtggcataaggaagactctattcatgtaggagtacgctgcatcgagatgctcattgagtcaaccggaatggttagcttacaccgccaaaatgctggcgtagtgggtgcagactctgagactatcgaactcgcacctgaatacgctgaggctatcgcaacccgtgcaggtgcgctggctggcatctctccgatgttccaaccttgcgtagttcctcctaagccgtggactggcattactggtggtggctattgggctgcggggcgcaaacccctgcagttagtacgtactcgcagtctggcggcgcttcgccgctatgaagaagtgtcgatgccggaggtcatcaaagcagtcaacattgcgcagaatacagcatggcgtattaacaagaaagttctcgacgtagcgaataccatcacccaatggaagcactgtccagtcgcggatgtgcctgcgatggatcgtggcgaaatgccagctcgtccgttggacatcgataccaaccctattgcacttaaagcgtggaagaaagaagcttccgcgttctaccgcaaagacaaagcacgcatgagccgtcgtatctcgatggagtttatgttatctcaggcgaacaagtttgcgaattatgaggcaatctggtttccgcaaaacatggattggcgtgggcgcgtgtacgctgtcccgatgttcaatcctcagggcaacgatatgacgaaaggcctgctgacctttgcgcaggagaaacccattggtgaagacggcttctattggctcaagattcatggcgcaaatacagctggagtggataaagtaccgtttccacaacgcatcaaatttgttgaggataaccatacgaatattatggaatgcgcgaaagcaccgctggaaaacacttggtgggcggaacaggactcgccgttctgctttctggcgttctgctttgagtatgctggcgtcatcaatagtggtctgtcgtacaactgtagcttgcctctggcatttgatggtagttgctccggcctgcaacatttctcagcgatgttacgcgacgaagttggcggcaaagctgtgaatctcctcccatctgcggaataccaggatatttatcgtatcgtcagcgacaaagttaacgagatgctgaaacaagatctgattaacggtacctctaccaccgtggaaacggtgactgataaaaagacaggcgaaattacccaacgcacgaaatacgggaccaaagttatggcacagtggtggttagaacacggtgtgaatcgtggcgtcacgaaacgcccggttatgactttggtgtatgggagcaaagagtttggattccgcgatcaagtgctgagtgacaccattcaaccggcgatcgataacggcaagggtgacatgtttctgaatccgaatcaggctgctggttacatggcgaaactgatctggaacgcagtgtccgggaccgtagtcgcagcagttgaggcgatgaactggctgaaaagtgcggcgaaattacttgctgctgaagtgaaggatgagaagacggatacagttctgcgtggccgctgcgcagtacattgggtgactcccgacggcttccctgtgtggcaggaatacaagaagcctattcaaacgcgcttgaacctgatgttcctcggtcagttccgcttacagcctaccattaacaccaacaaagatagcgagattgatgcacgcaaacaggtgtctggtatcgctcctaactttgtacacagcctggacggtaaccaccttcgtatgactgtagtgtgggcacacgagaagtacggaatcgaatcttttgcactgattcacgactccttcggtaccattccggctgacgctgcgaacctgttcaaagcagtgcgcgaaactttcgttgacacatatgagtcttgtgatgtactggctgatttctacgaccagattgctgaccagttgcacgagtctcaacgcgacaaaatgccagcacttccggctaaaggtaagttgaacctccgtgacatcttaaaatcggacttcgcgttcgcg

SEQ ID NO: 1524 - protein, 890 aa, synthetic construct
  REGION 1..890: note = Variant of RNA polymerase
MHHHHHHMNTINIAKNDFSDIELAAIPFNTLADHYGERLAREQLALEHESYEMGEARFRKMFERQLKAGEVADNAAAKPLITTLLPKMIARINDWFEEVKAKRGKRPTAFQFLQEIKPEAVAYITIKTTLACLTSADNTTVQAVASAIGRAIEDEARFGRIRDLEAKHFKKNVEEQLNKRVGHVYKKAFMQVVEHDMLSKGLLGGEAWSSWHKEDSIHVGVRCIEMLIESTGMVSLHRQNAGVVGADSETIELAPEYAEAIATRAGALAGISPMFQPCVVPPKPWTGITGGGYWAAGRKPLQLVRTRSLAALRRYEEVSMPEVIKAVNIAQNTAWRINKKVLDVANTITQWKHCPVADVPAMDRGEMPARPLDIDTNPIALKAWKKEASAFYRKDKARMSRRISMEFMLSQANKFANYEAIWFPQNMDWRGRVYAVPMFNPQGNDMTKGLLTFAQEKPIGEDGFYWLKIHGANTAGVDKVPFPQRIKFVEDNHTNIMECAKAPLENTWWAEQDSPFCFLAFCFEYAGVINSGLSYNCSLPLAFDGSCSGLQHFSAMLRDEVGGKAVNLLPSAEYQDIYRIVSDKVNEMLKQDLINGTSTTVETVTDKKTGEITQRTKYGTKVMAQWWLEHGVNRGVTKRPVMTLVYGSKEFGFRDQVLSDTIQPAIDNGKGDMFLNPNQAAGYMAKLIWNAVSGTVVAAVEAMNWLKSAAKLLAAEVKDEKTDTVLRGRCAVHWVTPDGFPVWQEYKKPIQTRLNLMFLGQFRLQPTINTNKDSEIDARKQVSGIAPNFVHSLDGNHLRMTVVWAHEKYGIESFALIHDSFGTIPADAANLFKAVRETFVDTYESCDVLADFYDQIADQLHESQRDKMPALPAKGKLNLRDILKSDFAFA

SEQ ID NO: 1525 - DNA, 2670 bp, synthetic construct
  misc_feature 1..2670: note = Variant of RNA polymerase
  source 1..2670: mol_type = other DNA
atgcaccatcaccatcaccatatgaacacgattaacattgctaagaacgacttctctgacatcgaactggctgctatcccgttcaacactctggctgaccattacggtgagcgtttagctcgcgaacagttggcccttgagcatgagtcttacgagatgggtgaagcacgcttccgcaagatgtttgagcgtcaacttaaagctggtgaggttgcggataacgctgccgccaagcctctcatcactaccctactccctaagatgattgcacgcatcaacgactggtttgaggaagtgaaagctaagcgcggcaagcgcccgacagccttccagttcctgcaagaaatcaagccggaagccgtagcgtacatcaccattaagaccactctggcttgcctaaccagtgcggacaatacaaccgttcaggctgtagcaagcgcaatcggtcgggccattgaggacgaggctcgcttcggtcgtatccgtgaccttgaagctaagcacttcaagaagaacgttgaggaacaactcaacaagcgcgtagggcacgtctacaagaaagcatttatgcaagttgtcgagcacgacatgctctctaagggtctactcggtggcgaggcgtggtcttcgtggcataaggaagactctattcatgtaggagtacgctgcatcgagatgctcattgagtcaaccggaatggttagcttacaccgccaaaatgctggcgtagtgggtgcagactctgagactatcgaactcgcacctgaatacgctgaggctatcgcaacccgtgcaggtgcgctggctggcatctctccgatgttccaaccttgcgtagttcctcctaagccgtggactggcattactggtggtggctattgggctgcggggcgcaaacccctgcagttagtacgtactcgcagtctggcggcgcttcgccgctatgaagaagtgtcgatgccggaggtcatcaaagcagtcaacattgcgcagaatacagcatggcgtattaacaagaaagttctcgacgtagcgaataccatcacccaatggcagcactgtccagtcgccgatgttcctgcgatggatcgtggcgaaatgccagctcgcccgttggacatcgataccaaccctattgcacttaaagcgtggaagaaagaggcttcggcgttctaccgcaaagacaaagcacgcatgagccgtcgtctgtcgatggagtttatgttatctcaggcgaacaagtttgcgaattatgaggcaatctggtttccgcaaaacatggattggcgtgggcgcgtgtacgctgtcccgatgttcaatcctcagggcaacgatatgacgaaaggcctgctgacctttgcgcaggagaaacccattggtgaagacggcttctattggctcaagattcatggcgcaaatacagctggagtggataaagtaccgtttccacaacgcatcaaatttgttgaggataaccatacgaatattatggaatgcgcgaaagcaccgctggaaaacacttggtgggcggaacaggactcgccgttctgctttctggcgttctgctttgagtatgctggcgtcatcaatagtggtctgtcgtacaactgtagcttgcctctggcatttgatggtagttgctccggcctgcaacatttctcagcgatgttacgcgacgaaattggcggcaaagctgtgaatctcctcccatctgcggaataccaggatatttatggtatcgtcagcgacaaagttaacgagatgctgaaacaagatctgattaacggtacctctaccaccgtggaaacggtgactgataaaaagacaggcgaaattacccaacgcacgaaatacgggaccaaagttatggcagggtggtggttagaacacggtgtgacccgtggcgccacgaaacgcccggttatgactttggtgtatgggagcaaagagtttggattccgcgatcaagtgctgagtgacaccattcaaccggcgatcgataacggcaagggtgacatgtttctgaatccgaatcaggctgctggttacatggcgaaactgatctggaacgcagtgtccgggaccgtagtcgcagcagttgaggcgatgaactggctgaaaagtgcggcgaaattacttgctgctgaagtgaaggatgagaagacggatacagttctgcgtggccgctgcgcagtacattgggtgactcccgacggcttccctgtgtggcaggaatacaagaagcctattcaaacgcgcttgaacctgatgttcctcggtcagttccgcttacagcctaccattaacaccaacaaagatagcgagattgatgcacgcaaacaggtgtctggtatcgctcctaactttgtacacagcctggacggtaaccaccttcgtatgactgtagtgtgggcacacgagaagtacggaatcgaatcttttgcactgattcacgactccttcggtaccattccggctgacgctgcgaacctgttcaaagcagtgcgcgaaactttcgttgacacatatgagtcttgtgatgtactggctgatttctacgaccagattgctgaccagttgcacgagtctcaacgcgacaaaatgccagcacttccggctaaaggtaagttgaacctccgtgacatcttaaaatcggacttcgcgttcgcg

SEQ ID NO: 1526 - protein, 890 aa, synthetic construct
  REGION 1..890: note = Variant of RNA polymerase
MHHHHHHMNTINIAKNDFSDIELAAIPFNTLADHYGERLAREQLALEHESYEMGEARFRKMFERQLKAGEVADNAAAKPLITTLLPKMIARINDWFEEVKAKRGKRPTAFQFLQEIKPEAVAYITIKTTLACLTSADNTTVQAVASAIGRAIEDEARFGRIRDLEAKHFKKNVEEQLNKRVGHVYKKAFMQVVEHDMLSKGLLGGEAWSSWHKEDSIHVGVRCIEMLIESTGMVSLHRQNAGVVGADSETIELAPEYAEAIATRAGALAGISPMFQPCVVPPKPWTGITGGGYWAAGRKPLQLVRTRSLAALRRYEEVSMPEVIKAVNIAQNTAWRINKKVLDVANTITQWQHCPVADVPAMDRGEMPARPLDIDTNPIALKAWKKEASAFYRKDKARMSRRLSMEFMLSQANKFANYEAIWFPQNMDWRGRVYAVPMFNPQGNDMTKGLLTFAQEKPIGEDGFYWLKIHGANTAGVDKVPFPQRIKFVEDNHTNIMECAKAPLENTWWAEQDSPFCFLAFCFEYAGVINSGLSYNCSLPLAFDGSCSGLQHFSAMLRDEIGGKAVNLLPSAEYQDIYGIVSDKVNEMLKQDLINGTSTTVETVTDKKTGEITQRTKYGTKVMAGWWLEHGVTRGATKRPVMTLVYGSKEFGFRDQVLSDTIQPAIDNGKGDMFLNPNQAAGYMAKLIWNAVSGTVVAAVEAMNWLKSAAKLLAAEVKDEKTDTVLRGRCAVHWVTPDGFPVWQEYKKPIQTRLNLMFLGQFRLQPTINTNKDSEIDARKQVSGIAPNFVHSLDGNHLRMTVVWAHEKYGIESFALIHDSFGTIPADAANLFKAVRETFVDTYESCDVLADFYDQIADQLHESQRDKMPALPAKGKLNLRDILKSDFAFA

SEQ ID NO: 1527 - DNA, 2670 bp, synthetic construct
  misc_feature 1..2670: note = Variant of RNA polymerase
  source 1..2670: mol_type = other DNA
atgcaccatcaccatcaccatatgaacacgattaacattgctaagaacgacttctctgacatcgaactggctgctatcccgttcaacactctggctgaccattacggtgagcgtttagctcgcgaacagttggcccttgagcatgagtcttacgagatgggtgaagcacgcttccgcaagatgtttgagcgtcaacttaaagctggtgaggttgcggataacgctgccgccaagcctctcatcactaccctactccctaagatgattgcacgcatcaacgactggtttgaggaagtgaaagctaagcgcggcaagcgcccgacagccttccagttcctgcaagaaatcaagccggaagccgtagcgtacatcaccattaagaccactctggcttgcctaaccagtgcggacaatacaaccgttcaggctgtagcaagcgcaatcggtcgggccattgaggacgaggctcgcttcggtcgtatccgtgaccttgaagctaagcacttcaagaagaacgttgaggaacaactcaacaagcgcgtagggcacgtctacaagaaagcatttatgcaagttgtcgagcacgacatgctctctaagggtctactcggtggcgaggcgtggtcttcgtggcataaggaagactctattcatgtaggagtacgctgcatcgagatgctcattgagtcaaccggaatggttagcttacaccgccaaaatgctggcgtagtgggtgcagactctgagactatcgaactcgcacctgaatacgctgaggctatcgcaacccgtgcaggtgcgctggctggcatctctccgatgttccaaccttgcgtagttcctcctaagccgtggactggcattactggtggtggctattgggctgcggggcgcaaacccctgcagttagtacgtactcgcagtctggcggcgcttcgccgctatgaagaagtgtcgatgccggaggtcatcaaagcagtcaacattgcgcagaatacagcatggcgtattaacaagaaagttctcgacgtagcgaataccatcacccaatggcagcactgtccagtccgtgatattcctgcgatggatcgtggcgaaatgccagctcgcccgttggacatcgataccaaccctattgcacttaaagcgtggaagaaagaagcttccgcgttctaccgccgcgacaaagcacgcatgagccgtcgtatctcgatggagtttatgttatctcaggcgaacaagtttgcgaattatgaggcaatctggtttccgcaaaacatggattggcgtgggcgcgtgtacgctgtcccgatgttcaatcctcagggcaacgatatgacgaaaggcctgctgacctttgcgcaggagaaacccattggtgaagacggcttctattggctcaagattcatggcgcaaatacagctggagtggataaagtaccgtttccacaacgcatcaaatttgttgaggataaccatacgaatattatggaatgcgcgaaagcaccgctggaaaacacttggtgggcggaacaggactcgccgttctgctttctggcgttctgctttgagtatgctggcgtcatcaatagtggtctgtcgtacaactgtagcttgcctctggcatttgatggtagttgctccggcctgcaacatttctcagcgatgttacgcgacgaaattggcggcaaagctgtgaatctcctcccatctgcggaataccaggatatttatcgtatcgtcagcgacaaagttaacgagatgctgaaacaagatctgattaacggtacctctaccaccgtggaaacggtgactgataaaaagacaggcgaaattacccaacgcacgaaatacgggaccaaagttatggcacaatggtggttagaacacggtgtgaatcgtggcgtcacgaaacgcccggttatgactttggtgtatgggagcaaagagtttggattccgcgatcaagtgctgagtgacaccattcaaccggcgatcgataacggcaagggtgacatgtttctgaatccgaatcaggctgctggttacatggcgaaactgatctggaacgcagtgtccgggaccgtagtcgcagcagttgaggcgatgaactggctgaaaagtgcggcgaaattacttgctgctgaagtgaaggatgagaagacggatacaattctgcgtggccgctgcgcagtacattgggtgactcccgacggcttccctgtgtggcaggaatacaagaagcctattcaaacgcgcttgaacctgatgttcctcggtcagttccgcttacagcctaccattaacaccaacaaagatagcgagattgatgcacgcaaacaggtgtctggtatcgctcctaactttgtacacagcctggacggtaaccaccttcgtatgactgtagtgtgggcacacgagaagtacggaatcgaatcttttgcactgattcacgactccttcggtaccattccggctgacgctgcgaacctgttcaaagcagtgcgcgaaactttcgttgacacatatgagtcttgtgatgtactggctgatttctacgaccagattgctgaccagttgcacgagtctcaacgcgacaaaatgccagcacttccggctaaaggtaagttgaacctccgtgacatcttaaaatcggacttcgcgttcgcg

SEQ ID NO: 1528 - protein, 890 aa, synthetic construct
  REGION 1..890: note = Variant of RNA polymerase
MHHHHHHMNTINIAKNDFSDIELAAIPFNTLADHYGERLAREQLALEHESYEMGEARFRKMFERQLKAGEVADNAAAKPLITTLLPKMIARINDWFEEVKAKRGKRPTAFQFLQEIKPEAVAYITIKTTLACLTSADNTTVQAVASAIGRAIEDEARFGRIRDLEAKHFKKNVEEQLNKRVGHVYKKAFMQVVEHDMLSKGLLGGEAWSSWHKEDSIHVGVRCIEMLIESTGMVSLHRQNAGVVGADSETIELAPEYAEAIATRAGALAGISPMFQPCVVPPKPWTGITGGGYWAAGRKPLQLVRTRSLAALRRYEEVSMPEVIKAVNIAQNTAWRINKKVLDVANTITQWQHCPVRDIPAMDRGEMPARPLDIDTNPIALKAWKKEASAFYRRDKARMSRRISMEFMLSQANKFANYEAIWFPQNMDWRGRVYAVPMFNPQGNDMTKGLLTFAQEKPIGEDGFYWLKIHGANTAGVDKVPFPQRIKFVEDNHTNIMECAKAPLENTWWAEQDSPFCFLAFCFEYAGVINSGLSYNCSLPLAFDGSCSGLQHFSAMLRDEIGGKAVNLLPSAEYQDIYRIVSDKVNEMLKQDLINGTSTTVETVTDKKTGEITQRTKYGTKVMAQWWLEHGVNRGVTKRPVMTLVYGSKEFGFRDQVLSDTIQPAIDNGKGDMFLNPNQAAGYMAKLIWNAVSGTVVAAVEAMNWLKSAAKLLAAEVKDEKTDTILRGRCAVHWVTPDGFPVWQEYKKPIQTRLNLMFLGQFRLQPTINTNKDSEIDARKQVSGIAPNFVHSLDGNHLRMTVVWAHEKYGIESFALIHDSFGTIPADAANLFKAVRETFVDTYESCDVLADFYDQIADQLHESQRDKMPALPAKGKLNLRDILKSDFAFA

SEQ ID NO: 1529 - DNA, 2670 bp, synthetic construct
  misc_feature 1..2670: note = Variant of RNA polymerase
  source 1..2670: mol_type = other DNA
atgcaccatcaccatcaccatatgaacacgattaacattgctaagaacgacttctctgacatcgaactggctgctatcccgttcaacactctggctgaccattacggtgagcgtttagctcgcgaacagttggcccttgagcatgagtcttacgagatgggtgaagcacgcttccgcaagatgtttgagcgtcaacttaaagctggtgaggttgcggataacgctgccgccaagcctctcatcactaccctactccctaagatgattgcacgcatcaacgactggtttgaggaagtgaaagctaagcgcggcaagcgcccgacagccttccagttcctgcaagaaatcaagccggaagccgtagcgtacatcaccattaagaccactctggcttgcctaaccagtgcggacaatacaaccgttcaggctgtagcaagcgcaatcggtcgggccattgaggacgaggctcgcttcggtcgtatccgtgaccttgaagctaagcacttcaagaagaacgttgaggaacaactcaacaagcgcgtagggcacgtctacaagaaagcatttatgcaagttgtcgagcacgacatgctctctaagggtctactcggtggcgaggcgtggtcttcgtggcataaggaagactctattcatgtaggagtacgctgcatcgagatgctcattgagtcaaccggaatggttagcttacaccgccaaaatgctggcgtagtgggtgcagactctgagactatcgaactcgcacctgaatacgctgaggctatcgcaacccgtgcaggtgcgctggctggcatctctccgatgttccaaccttgcgtagttcctcctaagccgtggactggcattactggtggtggctattgggctgcggggcgcaaacccctgcagttagtacgtactcgcagtctggcggcgcttcgccgctatgaagaagtgtcgatgccggaggtcatcaaagcagtcaacattgcgcagaatacagcatggcgtattaacaagaaagttctcgacgtagcgaataccatcacccaatggcagcactgtccagtcgcggatgtgcctgcgatggatcgtggcgaaatgccagctcgtccgttggacatcgataccaacgagattgcacttaaagcgtggaagaaagcggctgcggcgttctaccgcaaagacaaagcacgcatgagccgtcgtctgtcgatggagtttatgttatctcaggcgaacaagtttgcgaattatgaggcaatctggtttccgcaaaacatggattggcgtgggcgcgtgtacgctgtcccgatgttcaatcctcagggcaacgatatgacgaaaggcctgctgacctttgcgcaggagaaacccattggtgaagacggcttctattggctcaagattcatggcgcaaatacagctggagtggataaagtaccgtttccacaacgcatcaaatttattgaggataaccatacgaatattatggaatgcgcgaaagcaccgctggaaaacacttggtgggcggaacaggactcgccgttctgctttctggcgttctgctttgagtatgctggcgtcatcaatagtggtctgtcgtacaactgtagcttgcctctggcatttgatggtagttgctccggcctgcaacatttctcagcgatgttacgcgacgaaattggcggcaaagctgtgaatctcctcccatctgcggaataccaggatatttatggtatcgtcagcgacaaagttaacgagatgctgaaacaagatctgattaacggtacctctaccaccgtggaaacggtgactgataaaaagacaggcgaaattacccaacgcacgaaatacgggaccaaagttatggcagggtggtggttagaacacggtgtgaatcgtggcgtcacgaaacgcccggttatgactttggtgtatgggagcaaagagtttggattccgcgatcaagtgctgagtgacaccattcaaccggcgatcgataacggcaagggtgacatgtttctgaatccgaatcaggctgctggttacatggcgaaactgatctggaacgcagtgtccgggaccgtagtcgcagcagttgaggcgatgaactggctgaaaagtgcggcgaaattacttgctgctgaagtgaaggatgagaagacggatacagttctgcgtggccgctgcgcagtacattgggtgactcccgacggcttccctgtgtggcaggaatacaagaagcctattcaaacgcgcttgaacctgatgttcctcggtcagttccgcttacagcctaccattaacaccaacaaagatagcgagattgatgcacgcaaacaggtgtctggtatcgctcctaactttgtacacagcctggacggtaaccaccttcgtatgactgtagtgtgggcacacgagaagtacggaatcgaatcttttgcactgattcacgactccttcggtaccattccggctgacgctgcgaacctgttcaaagcagtgcgcgaaactttcgttgacacatatgagtcttgtgatgtactggctgatttctacgaccagattgctgaccagttgcacgagtctcaacgcgacaaaatgccagcacttccggctaaaggtaagttgaacctccgtgacatcttaaaatcggacttcgcgttcgcg

SEQ ID NO: 1530 - protein, 890 aa, synthetic construct
  REGION 1..890: note = Variant of RNA polymerase
MHHHHHHMNTINIAKNDFSDIELAAIPFNTLADHYGERLAREQLALEHESYEMGEARFRKMFERQLKAGEVADNAAAKPLITTLLPKMIARINDWFEEVKAKRGKRPTAFQFLQEIKPEAVAYITIKTTLACLTSADNTTVQAVASAIGRAIEDEARFGRIRDLEAKHFKKNVEEQLNKRVGHVYKKAFMQVVEHDMLSKGLLGGEAWSSWHKEDSIHVGVRCIEMLIESTGMVSLHRQNAGVVGADSETIELAPEYAEAIATRAGALAGISPMFQPCVVPPKPWTGITGGGYWAAGRKPLQLVRTRSLAALRRYEEVSMPEVIKAVNIAQNTAWRINKKVLDVANTITQWQHCPVADVPAMDRGEMPARPLDIDTNEIALKAWKKAAAAFYRKDKARMSRRLSMEFMLSQANKFANYEAIWFPQNMDWRGRVYAVPMFNPQGNDMTKGLLTFAQEKPIGEDGFYWLKIHGANTAGVDKVPFPQRIKFIEDNHTNIMECAKAPLENTWWAEQDSPFCFLAFCFEYAGVINSGLSYNCSLPLAFDGSCSGLQHFSAMLRDEIGGKAVNLLPSAEYQDIYGIVSDKVNEMLKQDLINGTSTTVETVTDKKTGEITQRTKYGTKVMAGWWLEHGVNRGVTKRPVMTLVYGSKEFGFRDQVLSDTIQPAIDNGKGDMFLNPNQAAGYMAKLIWNAVSGTVVAAVEAMNWLKSAAKLLAAEVKDEKTDTVLRGRCAVHWVTPDGFPVWQEYKKPIQTRLNLMFLGQFRLQPTINTNKDSEIDARKQVSGIAPNFVHSLDGNHLRMTVVWAHEKYGIESFALIHDSFGTIPADAANLFKAVRETFVDTYESCDVLADFYDQIADQLHESQRDKMPALPAKGKLNLRDILKSDFAFA

SEQ ID NO: 1531 - DNA, 2670 bp, synthetic construct
  misc_feature 1..2670: note = Variant of RNA polymerase
  source 1..2670: mol_type = other DNA
atgcaccatcaccatcaccatatgaacacgattaacattgctaagaacgacttctctgacatcgaactggctgctatcccgttcaacactctggctgaccattacggtgagcgtttagctcgcgaacagttggcccttgagcatgagtcttacgagatgggtgaagcacgcttccgcaagatgtttgagcgtcaacttaaagctggtgaggttgcggataacgctgccgccaagcctctcatcactaccctactccctaagatgattgcacgcatcaacgactggtttgaggaagtgaaagctaagcgcggcaagcgcccgacagccttccagttcctgcaagaaatcaagccggaagccgtagcgtacatcaccattaagaccactctggcttgcctaaccagtgcggacaatacaaccgttcaggctgtagcaagcgcaatcggtcgggccattgaggacgaggctcgcttcggtcgtatccgtgaccttgaagctaagcacttcaagaagaacgttgaggaacaactcaacaagcgcgtagggcacgtctacaagaaagcatttatgcaagttgtcgagcacgacatgctctctaagggtctactcggtggcgaggcgtggtcttcgtggcataaggaagactctattcatgtaggagtacgctgcatcgagatgctcattgagtcaaccggaatggttagcttacaccgccaaaatgctggcgtagtgggtgcagactctgagactatcgaactcgcacctgaatacgctgaggctatcgcaacccgtgcaggtgcgctggctggcatctctccgatgttccaaccttgcgtagttcctcctaagccgtggactggcattactggtggtggctattgggctgcggggcgcaaacccctgcagttagtacgtactcgcagtctggcggcgcttcgccgctatgaagaagtgtcgatgccggaggtcatcaaagcagtcaacattgcgcagaatacagcatggcgtattaacaagaaagttctcgacgtagcgaataccatcacccaatggaagcactgtccagtcgcggatgtgcctgcgatggatcgtggcgaaatgccagctcgtccgttggacatcgataccaaccctattgcacttaaagcgtggaagaaagaagcttccgcgttctaccgcaaagacaaagcacgcatgagccgtcgtctgtcgatggagtttatgttatctcaggcgaacaagtttgcgaattatgaggcaatctggtttccgcaaaacatggattggcgtgggcgcgtgtacgctgtcccgatgttcaatcctcagggcaacgatatgacgaaaggcctgctgacctttgcgcaggagaaacccattggtgaagacggcttctattggctcaagattcatggcgcaaatacagctggagtggataaagtaccgtttccacaacgcatcaaatttgttgaggataaccatacgaatattatggaatgcgcgaaagcaccgctggaaaacacttggtgggcggaacaggactcgccgttctgctttctggcgttctgctttgagtatgctggcgtcatcaatagtggtctgtcgtacaactgtagcttgcctctggcatttgatggtagttgctccggcctgcaacatttctcagcgatgttacgcgacgaaattggcggcaaagctgtgaatctcctcccatctgcggaataccaggatatttatcgtatcgtcagcgacaaagttaacgagatgctgaaacaagatctgattaacggtacctctaccaccgtggaaacggtgactgataaaaagacaggcgaaattacccaacgcacgaaatacgggaccaaagttatggcacagtggtggttagagcacggtgtgaaccgtggcgtcacgaaacgcccggttatgactttggtgtatgggagcaaagagtttggattccgcgatcaagtgctgagtgacaccattcaaccggcgatcgataacggcaagggtgacatgtttctgaatccgaatcaggctgctggttacatggcgaaactgatctggaacgcagtgtccgggaccgtagtcgcagcagttgaggcgatgaactggctgaaaagtgcggcgaaattacttgctgctgaagtgaaggatgagaagacggatacagttctgcgtggccgctgcgcagtacattgggtgactcccgacggcttccctgtgtggcaggaatacaagaagcctattcaaacgcgcttgaacctgatgttcctcggtcagttccgcttacagcctaccattaacaccaacaaagatagcgagattgatgcacgcaaacaggtgtctggtatcgctcctaactttgtacacagcctggacggtaaccaccttcgtatgactgtagtgtgggcacacgagaagtacggaatcgaatcttttgcactgattcacgactccttcggtaccattccggctgacgctgcgaacctgttcaaagcagtgcgcgaaactttcgttgacacatatgagtcttgtgatgtactggctgatttctacgaccagattgctgaccagttgcacgagtctcaacgcgacaaaatgccagcacttccggctaaaggtaagttgaacctccgtgacatcttaaaatcggacttcgcgttcgcg

SEQ ID NO: 1532 - protein, 890 aa, synthetic construct
  REGION 1..890: note = Variant of RNA polymerase
MHHHHHHMNTINIAKNDFSDIELAAIPFNTLADHYGERLAREQLALEHESYEMGEARFRKMFERQLKAGEVADNAAAKPLITTLLPKMIARINDWFEEVKAKRGKRPTAFQFLQEIKPEAVAYITIKTTLACLTSADNTTVQAVASAIGRAIEDEARFGRIRDLEAKHFKKNVEEQLNKRVGHVYKKAFMQVVEHDMLSKGLLGGEAWSSWHKEDSIHVGVRCIEMLIESTGMVSLHRQNAGVVGADSETIELAPEYAEAIATRAGALAGISPMFQPCVVPPKPWTGITGGGYWAAGRKPLQLVRTRSLAALRRYEEVSMPEVIKAVNIAQNTAWRINKKVLDVANTITQWKHCPVADVPAMDRGEMPARPLDIDTNPIALKAWKKEASAFYRKDKARMSRRLSMEFMLSQANKFANYEAIWFPQNMDWRGRVYAVPMFNPQGNDMTKGLLTFAQEKPIGEDGFYWLKIHGANTAGVDKVPFPQRIKFVEDNHTNIMECAKAPLENTWWAEQDSPFCFLAFCFEYAGVINSGLSYNCSLPLAFDGSCSGLQHFSAMLRDEIGGKAVNLLPSAEYQDIYRIVSDKVNEMLKQDLINGTSTTVETVTDKKTGEITQRTKYGTKVMAQWWLEHGVNRGVTKRPVMTLVYGSKEFGFRDQVLSDTIQPAIDNGKGDMFLNPNQAAGYMAKLIWNAVSGTVVAAVEAMNWLKSAAKLLAAEVKDEKTDTVLRGRCAVHWVTPDGFPVWQEYKKPIQTRLNLMFLGQFRLQPTINTNKDSEIDARKQVSGIAPNFVHSLDGNHLRMTVVWAHEKYGIESFALIHDSFGTIPADAANLFKAVRETFVDTYESCDVLADFYDQIADQLHESQRDKMPALPAKGKLNLRDILKSDFAFA

SEQ ID NO: 1533 - DNA, 2670 bp, synthetic construct
  misc_feature 1..2670: note = Variant of RNA polymerase
  source 1..2670: mol_type = other DNA
atgcaccatcaccatcaccatatgaacacgattaacattgctaagaacgacttctctgacatcgaactggctgctatcccgttcaacactctggctgaccattacggtgagcgtttagctcgcgaacagttggcccttgagcatgagtcttacgagatgggtgaagcacgcttccgcaagatgtttgagcgtcaacttaaagctggtgaggttgcggataacgctgccgccaagcctctcatcactaccctactccctaagatgattgcacgcatcaacgactggtttgaggaagtgaaagctaagcgcggcaagcgcccgacagccttccagttcctgcaagaaatcaagccggaagccgtagcgtacatcaccattaagaccactctggcttgcctaaccagtgcggacaatacaaccgttcaggctgtagcaagcgcaatcggtcgggccattgaggacgaggctcgcttcggtcgtatccgtgaccttgaagctaagcacttcaagaagaacgttgaggaacaactcaacaagcgcgtagggcacgtctacaagaaagcatttatgcaagttgtcgagcacgacatgctctctaagggtctactcggtggcgaggcgtggtcttcgtggcataaggaagactctattcatgtaggagtacgctgcatcgagatgctcattgagtcaaccggaatggttagcttacaccgccaaaatgctggcgtagtgggtgcagactctgagactatcgaactcgcacctgaatacgctgaggctatcgcaacccgtgcaggtgcgctggctggcatctctccgatgttccaaccttgcgtagttcctcctaagccgtggactggcattactggtggtggctattgggctgcggggcgcaaacccctgcagttagtacgtactcgcagtctggcggcgcttcgccgctatgaagaagtgtcgatgccggaggtcatcaaagcagtcaacattgcgcagaatacagcatggcgtattaacaagaaagttctcgacgtagcgaataccatcacccaatggcagcactgtccagtccgtgatgttcctgcgatggatcgtggcgaaatgccagctcgtccgttggacatcgataccaaccctattgcacttaaagcgtggaagaaagaggcttcggcgttctaccgccgcgacaaagcacgcatgagccgtcgtctgtcgatggagtttatgttatctcaggcgaacaagtttgcgaattatgaggcaatctggtttccgcaaaacatggattggcgtgggcgcgtgtacgctgtcccgatgttcaatcctcagggcaacgatatgacgaaaggcctgctgacctttgcgcaggagaaacccattggtgaagacggcttctattggctcaagattcatggcgcaaatacagctggagtggataaagtaccgtttccacaacgcatcaaatttgttgaggataaccatacgaatattatggaatgcgcgaaagcaccgctggaaaacacttggtgggcggaacaggactcgccgttctgctttctggcgttctgctttgagtatgctggcgtcatcaatagtggtctgtcgtacaactgtagcttgcctctggcatttgatggtagttgctccggcctgcaacatttctcagcgatgttacgcgacgaaattggcggcaaagctgtgaatctcctcccatctgcggaataccaggatatttatcgtatcgtcagcgacaaagttaacgagatgctgaaacaagatctgattaacggtacctctaccaccgtggaaacggtgactgataaaaagacaggcgaaattacccaacgcacgaaatacgggaccaaagttatggcacaatggtggttagaacacggtgtgaatcgtggcgtcacgaaacgcccggttatgactttggtgtatgggagcaaagagtttggattccgcgatcaagtgctgagtgacaccattcaaccggcgatcgataacggcaagggtgacatgtttctgaatccgaatcaggctgctggttacatggcgaaactgatctggaacgcggtgtccgggaccgtagtcgcagcagttgaggcgatgaactggctgaaaagtgcggcgaaattacttgctgctgaagtgaaggatgagaagacggatacagttctgcgtggccgctgcgcagtacattgggtgactcccgacggcttccctgtgtggcaggaatacaagaagcctattcaaacgcgcttgaacctgatgttcctcggtcagttccgcttacagcctaccattaacaccaacaaagatagcgagattgatgcacgcaaacaggtgtctggtatcgctcctaactttgtacacagcctggacggtaaccaccttcgtatgactgtagtgtgggcacacgagaagtacggaatcgaatcttttgcactgattcacgactccttcggtaccattccggctgacgctgcgaacctgttcaaagcagtgcgcgaaactttcgttgacacatatgagtcttgtgatgtactggctgatttctacgaccagattgctgaccagttgcacgagtctcaacgcgacaaaatgccagcacttccggctaaaggtaagttgaacctccgtgacatcttaaaatcggacttcgcgttcgcg

SEQ ID NO: 1534 - protein, 890 aa, synthetic construct
  REGION 1..890: note = Variant of RNA polymerase
MHHHHHHMNTINIAKNDFSDIELAAIPFNTLADHYGERLAREQLALEHESYEMGEARFRKMFERQLKAGEVADNAAAKPLITTLLPKMIARINDWFEEVKAKRGKRPTAFQFLQEIKPEAVAYITIKTTLACLTSADNTTVQAVASAIGRAIEDEARFGRIRDLEAKHFKKNVEEQLNKRVGHVYKKAFMQVVEHDMLSKGLLGGEAWSSWHKEDSIHVGVRCIEMLIESTGMVSLHRQNAGVVGADSETIELAPEYAEAIATRAGALAGISPMFQPCVVPPKPWTGITGGGYWAAGRKPLQLVRTRSLAALRRYEEVSMPEVIKAVNIAQNTAWRINKKVLDVANTITQWQHCPVRDVPAMDRGEMPARPLDIDTNPIALKAWKKEASAFYRRDKARMSRRLSMEFMLSQANKFANYEAIWFPQNMDWRGRVYAVPMFNPQGNDMTKGLLTFAQEKPIGEDGFYWLKIHGANTAGVDKVPFPQRIKFVEDNHTNIMECAKAPLENTWWAEQDSPFCFLAFCFEYAGVINSGLSYNCSLPLAFDGSCSGLQHFSAMLRDEIGGKAVNLLPSAEYQDIYRIVSDKVNEMLKQDLINGTSTTVETVTDKKTGEITQRTKYGTKVMAQWWLEHGVNRGVTKRPVMTLVYGSKEFGFRDQVLSDTIQPAIDNGKGDMFLNPNQAAGYMAKLIWNAVSGTVVAAVEAMNWLKSAAKLLAAEVKDEKTDTVLRGRCAVHWVTPDGFPVWQEYKKPIQTRLNLMFLGQFRLQPTINTNKDSEIDARKQVSGIAPNFVHSLDGNHLRMTVVWAHEKYGIESFALIHDSFGTIPADAANLFKAVRETFVDTYESCDVLADFYDQIADQLHESQRDKMPALPAKGKLNLRDILKSDFAFA

SEQ ID NO: 1535 - DNA, 2670 bp, synthetic construct
  misc_feature 1..2670: note = Variant of RNA polymerase
  source 1..2670: mol_type = other DNA
atgcaccatcaccatcaccatatgaacacgattaacattgctaagaacgacttctctgacatcgaactggctgctatcccgttcaacactctggctgaccattacggtgagcgtttagctcgcgaacagttggcccttgagcatgagtcttacgagatgggtgaagcacgcttccgcaagatgtttgagcgtcaacttaaagctggtgaggttgcggataacgctgccgccaagcctctcatcactaccctactccctaagatgattgcacgcatcaacgactggtttgaggaagtgaaagctaagcgcggcaagcgcccgacagccttccagttcctgcaagaaatcaagccggaagccgtagcgtacatcaccattaagaccactctggcttgcctaaccagtgcggacaatacaaccgttcaggctgtagcaagcgcaatcggtcgggccattgaggacgaggctcgcttcggtcgtatccgtgaccttgaagctaagcacttcaagaagaacgttgaggaacaactcaacaagcgcgtagggcacgtctacaagaaagcatttatgcaagttgtcgagcacgacatgctctctaagggtctactcggtggcgaggcgtggtcttcgtggcataaggaagactctattcatgtaggagtacgctgcatcgagatgctcattgagtcaaccggaatggttagcttacaccgccaaaatgctggcgtagtgggtgcagactctgagactatcgaactcgcacctgaatacgctgaggctatcgcaacccgtgcaggtgcgctggctggcatctctccgatgttccaaccttgcgtagttcctcctaagccgtggactggcattactggtggtggctattgggctgcggggcgcaaacccctgcagttagtacgtactcgcagtctggcggcgcttcgccgctatgaagaagtgtcgatgccggaggtcatcaaagcagtcaacattgcgcagaatacagcatggcgtattaacaagaaagttctcgacgtagcgaataccatcacccaatggcagcactgtccagtccgtgatgttcctgcgatggatcgtggcgaaatgccagctcgcccgttggacatcgataccaacgagattgcacttaaagcgtggaagaaagaagcttccgcgttctaccgcaaagacaaagcacgcatgagccgtcgtctgtcgatggagtttatgttatctcaggcgaacaagtttgcgaattatgaggcaatctggtttccgcaaaacatggattggcgtgggcgcgtgtacgctgtcccgatgttcaatcctcagggcaacgatatgacgaaaggcctgctgacctttgcgcaggagaaacccattggtgaagacggcttctattggctcaagattcatggcgcaaatacagctggagtggataaagtaccgtttccacaacgcatcaaatttgttgaggataaccatacgaatattatggaatgcgcgaaagcaccgctggaaaacacttggtgggcggaacaggactcgccgttctgctttctggcgttctgctttgagtatgctggcgtcatcaatagtggtctgtcgtacaactgtagcttgcctctggcatttgatggtagttgctccggcctgcaacatttctcagcgatgttacgcgacgaaattggcggcaaagctgtgaatctcctcccatctgcggaataccaggatatttatcgtatcgtcagcgacaaagttaacgagatgctgaaacaagatctgattaacggtacctctaccaccgtggaaacggtgactgataaaaagacaggcgaaattacccaacgcacgaaatacgggaccaaagttatggcagggtggtggttagaacacggtgtgaatcgtggcgtcacgaaacgcccggttatgactttggtgtatgggagcaaagagtttggattccgcgatcaagtgctgagtgacaccattcaaccggcgatcgataacggcaagggtgacatgtttctgaatccgaatcaggctgctggttacatggcgaaactgatctggaacgcagtgtccgggaccgtagtcgcagcagttgaggcgatgaactggctgaaaagtgcggcgaaattacttgctgctgaagtgaaggatgagaagacggatacagttctgcgtggccgctgcgcagtacattgggtgactcccgacggcttccctgtgtggcaggaatacaagaagcctattcaaacgcgcttgaacctgatgttcctcggtcagttccgcttacagcctaccattaacaccaacaaagatagcgagattgatgcacgcaaacaggtgtctggtatcgctcctaactttgtacacagcctggacggtaaccaccttcgtatgactgtagtgtgggcacacgagaagtacggaatcgaatcttttgcactgattcacgactccttcggtaccattccggctgacgctgcgaacctgttcaaagcagtgcgcgaaactttcgttgacacatatgagtcttgtgatgtactggctgatttctacgaccagattgctgaccagttgcacgagtctcaacgcgacaaaatgccagcacttccggctaaaggtaagttgaacctccgtgacatcttaaaatcggacttcgcgttcgcg

SEQ ID NO: 1536 - protein, 890 aa, synthetic construct
  REGION 1..890: note = Variant of RNA polymerase
MHHHHHHMNTINIAKNDFSDIELAAIPFNTLADHYGERLAREQLALEHESYEMGEARFRKMFERQLKAGEVADNAAAKPLITTLLPKMIARINDWFEEVKAKRGKRPTAFQFLQEIKPEAVAYITIKTTLACLTSADNTTVQAVASAIGRAIEDEARFGRIRDLEAKHFKKNVEEQLNKRVGHVYKKAFMQVVEHDMLSKGLLGGEAWSSWHKEDSIHVGVRCIEMLIESTGMVSLHRQNAGVVGADSETIELAPEYAEAIATRAGALAGISPMFQPCVVPPKPWTGITGGGYWAAGRKPLQLVRTRSLAALRRYEEVSMPEVIKAVNIAQNTAWRINKKVLDVANTITQWQHCPVRDVPAMDRGEMPARPLDIDTNEIALKAWKKEASAFYRKDKARMSRRLSMEFMLSQANKFANYEAIWFPQNMDWRGRVYAVPMFNPQGNDMTKGLLTFAQEKPIGEDGFYWLKIHGANTAGVDKVPFPQRIKFVEDNHTNIMECAKAPLENTWWAEQDSPFCFLAFCFEYAGVINSGLSYNCSLPLAFDGSCSGLQHFSAMLRDEIGGKAVNLLPSAEYQDIYRIVSDKVNEMLKQDLINGTSTTVETVTDKKTGEITQRTKYGTKVMAGWWLEHGVNRGVTKRPVMTLVYGSKEFGFRDQVLSDTIQPAIDNGKGDMFLNPNQAAGYMAKLIWNAVSGTVVAAVEAMNWLKSAAKLLAAEVKDEKTDTVLRGRCAVHWVTPDGFPVWQEYKKPIQTRLNLMFLGQFRLQPTINTNKDSEIDARKQVSGIAPNFVHSLDGNHLRMTVVWAHEKYGIESFALIHDSFGTIPADAANLFKAVRETFVDTYESCDVLADFYDQIADQLHESQRDKMPALPAKGKLNLRDILKSDFAFA

SEQ ID NO: 1537 - DNA, 2670 bp, synthetic construct
  misc_feature 1..2670: note = Variant of RNA polymerase
  source 1..2670: mol_type = other DNA
atgcaccatcaccatcaccatatgaacacgattaacattgctaagaacgacttctctgacatcgaactggctgctatcccgttcaacactctggctgaccattacggtgagcgtttagctcgcgaacagttggcccttgagcatgagtcttacgagatgggtgaagcacgcttccgcaagatgtttgagcgtcaacttaaagctggtgaggttgcggataacgctgccgccaagcctctcatcactaccctactccctaagatgattgcacgcatcaacgactggtttgaggaagtgaaagctaagcgcggcaagcgcccgacagccttccagttcctgcaagaaatcaagccggaagccgtagcgtacatcaccattaagaccactctggcttgcctaaccagtgcggacaatacaaccgttcaggctgtagcaagcgcaatcggtcgggccattgaggacgaggctcgcttcggtcgtatccgtgaccttgaagctaagcacttcaagaagaacgttgaggaacaactcaacaagcgcgtagggcacgtctacaagaaagcatttatgcaagttgtcgagcacgacatgctctctaagggtctactcggtggcgaggcgtggtcttcgtggcataaggaagactctattcatgtaggagtacgctgcatcgagatgctcattgagtcaaccggaatggttagcttacaccgccaaaatgctggcgtagtgggtgcagactctgagactatcgaactcgcacctgaatacgctgaggctatcgcaacccgtgcaggtgcgctggctggcatctctccgatgttccaaccttgcgtagttcctcctaagccgtggactggcattactggtggtggctattgggctgcggggcgcaaacccctgcagttagtacgtactcgcagtctggcggcgcttcgccgctatgaagaagtgtcgatgccggaggtcatcaaagcagtcaacattgcgcagaatacagcatggcgtattaacaagaaagttctcgacgtagcgaataccatcacccaatggaagcactgtccagtcgcggatgtgcctgcgatcgatcgtggcgaaatgccagctcgtccgttggacatcgataccaacgagattgcacttaaagcgtggaagaaagcggcttcggcgttctaccgcaaagacaaagcacgcatgagccgtcgtctgtcgatggagtttatgttatctcaggcgaacaagtttgcgaattatgaggcaatctggtttccgcaaaacatggattggcgtgggcgcgtgtacgctgtcccgatgttcaatcctcagggcaacgatatgacgaaaggcctgctgacctttgcgcaggagaaacccattggtgaagacggcttctattggctcaagattcatggcgcaaatacagctggagtggataaagtaccgtttccacaacgcatcaaatttgttgaggataaccatacgaatattatggaatgcgcgaaagcaccgctggaaaacacttggtgggcggaacaggactcgccgttctgctttctggcgttctgctttgagtatgctggcgtcatcaatagtggtctgtcgtacaactgtagcttgcctctggcatttgatggtagttgctccggcctgcaacatttctcagcgatgttacgcgacgaagttggcggcaaagctgtgaatctcctcccatctgcggaataccaggatatttatcgtatcgtcagcgacaaagttaacgagatgctgaaacaagatctgattaacggtacctctaccaccgtggaaacggtgactgataaaaagacaggcgaaattacccaacgcacgaaatacgggaccaaagttatggcacaatggtggttagaacacggtgtgaatcgtggcgtcacgaaacgcccggttatgactttggtgtatgggagcaaagagtttggattccgcgatcaagtgctgagtgacaccattcaaccggcgatcgataacggcaagggtgacatgtttctgaatccgaatcaggctgctggttacatggcgaaactgatctggaacgcggtgtccgggaccgtagtcgcagcagttgaggcgatgaactggctgaaaagtgcggcgaaattacttgctgctgaagtgaaggatgagaagacggatacagttctgcgtggccgctgcgcagtacattgggtgactcccgacggcttccctgtgtggcaggaatacaagaagcctattcaaacgcgcttgaacctgatgttcctcggtcagttccgcttacagcctaccattaacaccaacaaagatagcgagattgatgcacgcaaacaggtgtctggtatcgctcctaactttgtacacagcctggacggtaaccaccttcgtatgactgtagtgtgggcacacgagaagtacggaatcgaatcttttgcactgattcacgactccttcggtaccattccggctgacgctgcgaacctgttcaaagcagtgcgcgaaactttcgttgacacatatgagtcttgtgatgtactggctgatttctacgaccagattgctgaccagttgcacgagtctcaacgcgacaaaatgccagcacttccggctaaaggtaagttgaacctccgtgacatcttaaaatcggacttcgcgttcgcg

SEQ ID NO: 1538 - protein, 890 aa, synthetic construct
  REGION 1..890: note = Variant of RNA polymerase
MHHHHHHMNTINIAKNDFSDIELAAIPFNTLADHYGERLAREQLALEHESYEMGEARFRKMFERQLKAGEVADNAAAKPLITTLLPKMIARINDWFEEVKAKRGKRPTAFQFLQEIKPEAVAYITIKTTLACLTSADNTTVQAVASAIGRAIEDEARFGRIRDLEAKHFKKNVEEQLNKRVGHVYKKAFMQVVEHDMLSKGLLGGEAWSSWHKEDSIHVGVRCIEMLIESTGMVSLHRQNAGVVGADSETIELAPEYAEAIATRAGALAGISPMFQPCVVPPKPWTGITGGGYWAAGRKPLQLVRTRSLAALRRYEEVSMPEVIKAVNIAQNTAWRINKKVLDVANTITQWKHCPVADVPAIDRGEMPARPLDIDTNEIALKAWKKAASAFYRKDKARMSRRLSMEFMLSQANKFANYEAIWFPQNMDWRGRVYAVPMFNPQGNDMTKGLLTFAQEKPIGEDGFYWLKIHGANTAGVDKVPFPQRIKFVEDNHTNIMECAKAPLENTWWAEQDSPFCFLAFCFEYAGVINSGLSYNCSLPLAFDGSCSGLQHFSAMLRDEVGGKAVNLLPSAEYQDIYRIVSDKVNEMLKQDLINGTSTTVETVTDKKTGEITQRTKYGTKVMAQWWLEHGVNRGVTKRPVMTLVYGSKEFGFRDQVLSDTIQPAIDNGKGDMFLNPNQAAGYMAKLIWNAVSGTVVAAVEAMNWLKSAAKLLAAEVKDEKTDTVLRGRCAVHWVTPDGFPVWQEYKKPIQTRLNLMFLGQFRLQPTINTNKDSEIDARKQVSGIAPNFVHSLDGNHLRMTVVWAHEKYGIESFALIHDSFGTIPADAANLFKAVRETFVDTYESCDVLADFYDQIADQLHESQRDKMPALPAKGKLNLRDILKSDFAFA

SEQ ID NO: 1539 - DNA, 2670 bp, synthetic construct
  misc_feature 1..2670: note = Variant of RNA polymerase
  source 1..2670: mol_type = other DNA
atgcaccatcaccatcaccatatgaacacgattaacattgctaagaacgacttctctgacatcgaactggctgctatcccgttcaacactctggctgaccattacggtgagcgtttagctcgcgaacagttggcccttgagcatgagtcttacgagatgggtgaagcacgcttccgcaagatgtttgagcgtcaacttaaagctggtgaggttgcggataacgctgccgccaagcctctcatcactaccctactccctaagatgattgcacgcatcaacgactggtttgaggaagtgaaagctaagcgcggcaagcgcccgacagccttccagttcctgcaagaaatcaagccggaagccgtagcgtacatcaccattaagaccactctggcttgcctaaccagtgcggacaatacaaccgttcaggctgtagcaagcgcaatcggtcgggccattgaggacgaggctcgcttcggtcgtatccgtgaccttgaagctaagcacttcaagaagaacgttgaggaacaactcaacaagcgcgtagggcacgtctacaagaaagcatttatgcaagttgtcgagcacgacatgctctctaagggtctactcggtggcgaggcgtggtcttcgtggcataaggaagactctattcatgtaggagtacgctgcatcgagatgctcattgagtcaaccggaatggttagcttacaccgccaaaatgctggcgtagtgggtgcagactctgagactatcgaactcgcacctgaatacgctgaggctatcgcaacccgtgcaggtgcgctggctggcatctctccgatgttccaaccttgcgtagttcctcctaagccgtggactggcattactggtggtggctattgggctgcggggcgcaaacccctgcagttagtacgtactcgcagtctgaaggcgcttcgccgctatgaagaagtgtcgatgccggaggtcatcaaagcagtcaacattgcgcagaatacagcatggcgtattaacaagaaagttctcgacgtagcgaataccatcacccaatggcagcactgtccagtccgtgatattcctgcgatggatcgtggcgaaatgccagctcgtccgttggacatcgataccaacgagattgcacttaaagcgtggaagaaagcggcttcggcgttctaccgcaaagacaaagcacgcatgagccgtcgtctgtcgatggagtttatgttatctcaggcgaacaagtttgcgaattatgaggcaatctggtttccgcaaaacatggattggcgtgggcgcgtgtacgctgtcccgatgttcaatcctcagggcaacgatatgacgaaaggcctgctgacctttgcgcaggagaaacccattggtgaagacggcttctattggctcaagattcatggcgcaaatacagctggagtggataaagtaccgtttccacaacgcatcaaatttgttgaggataaccatacgaatattatggaatgcgcgaaagcaccgctggaaaacacttggtgggcggaacaggactcgccgttctgctttctggcgttctgctttgagtatgctggcgtcatcaatagtggtctgtcgtacaactgtagcttgcctctggcatttgatggtagttgctccggcctgcaacatttctcagcgatgttacgcgacgaaattggcggcaaagctgtgaatctcctcccatctgcggaataccaggatatttatcgtatcgtcagcgacaaagttaacgagatgctgaaacaagatctgattaacggtacctctaccaccgtggaaacggtgactgataaaaagacaggcgaaattacccaacgcacgaaatacgggaccaaagttatggcacaatggtggttagaacacggtgtgaatcgtggcgtcacgaaacgcccggttatgactttggtgtatgggagcaaagagtttggattccgcgatcaagtgctgagtgacaccattcaaccggcgatcgataacggcaagggtctgatgtttctgaatccgaatcaggctgctggttacatggcgaaactgatctggaacgcagtgtccgggaccgtagtcgcagcagttgaggcgatgaactggctgaaaagtgcggcgaaattacttgctgctgaagtgaaggatgagaagacggatacaattctgcgtggccgctgcgcagtacattgggtgactcccgacggcttccctgtgtggcaggaatacaagaagcctattcaaacgcgcttgaacctgatgttcctcggtcagttccgcttacagcctaccattaacaccaacaaagatagcgagattgatgcacgcaaacaggtgtctggtatcgctcctaactttgtacacagcctggacggtaaccaccttcgtatgactgtagtgtgggcacacgagaagtacggaatcgaatcttttgcactgattcacgactccttcggtaccattccggctgacgctgcgaacctgttcaaagcagtgcgcgaaactttcgttgacacatatgagtcttgtgatgtactggctgatttctacgaccagattgctgaccagttgcacgagtctcaacgcgacaaaatgccagcacttccggctaaaggtaagttgaacctccgtgacatcttaaaatcggacttcgcgttcgcg

SEQ ID NO: 1540 - protein, 890 aa, synthetic construct
  REGION 1..890: note = Variant of RNA polymerase
MHHHHHHMNTINIAKNDFSDIELAAIPFNTLADHYGERLAREQLALEHESYEMGEARFRKMFERQLKAGEVADNAAAKPLITTLLPKMIARINDWFEEVKAKRGKRPTAFQFLQEIKPEAVAYITIKTTLACLTSADNTTVQAVASAIGRAIEDEARFGRIRDLEAKHFKKNVEEQLNKRVGHVYKKAFMQVVEHDMLSKGLLGGEAWSSWHKEDSIHVGVRCIEMLIESTGMVSLHRQNAGVVGADSETIELAPEYAEAIATRAGALAGISPMFQPCVVPPKPWTGITGGGYWAAGRKPLQLVRTRSLKALRRYEEVSMPEVIKAVNIAQNTAWRINKKVLDVANTITQWQHCPVRDIPAMDRGEMPARPLDIDTNEIALKAWKKAASAFYRKDKARMSRRLSMEFMLSQANKFANYEAIWFPQNMDWRGRVYAVPMFNPQGNDMTKGLLTFAQEKPIGEDGFYWLKIHGANTAGVDKVPFPQRIKFVEDNHTNIMECAKAPLENTWWAEQDSPFCFLAFCFEYAGVINSGLSYNCSLPLAFDGSCSGLQHFSAMLRDEIGGKAVNLLPSAEYQDIYRIVSDKVNEMLKQDLINGTSTTVETVTDKKTGEITQRTKYGTKVMAQWWLEHGVNRGVTKRPVMTLVYGSKEFGFRDQVLSDTIQPAIDNGKGLMFLNPNQAAGYMAKLIWNAVSGTVVAAVEAMNWLKSAAKLLAAEVKDEKTDTILRGRCAVHWVTPDGFPVWQEYKKPIQTRLNLMFLGQFRLQPTINTNKDSEIDARKQVSGIAPNFVHSLDGNHLRMTVVWAHEKYGIESFALIHDSFGTIPADAANLFKAVRETFVDTYESCDVLADFYDQIADQLHESQRDKMPALPAKGKLNLRDILKSDFAFA

SEQ ID NO: 1541 - DNA, 2670 bp, synthetic construct
  misc_feature 1..2670: note = Variant of RNA polymerase
  source 1..2670: mol_type = other DNA
atgcaccatcaccatcaccatatgaacacgattaacattgctaagaacgacttctctgacatcgaactggctgctatcccgttcaacactctggctgaccattacggtgagcgtttagctcgcgaacagttggcccttgagcatgagtcttacgagatgggtgaagcacgcttccgcaagatgtttgagcgtcaacttaaagctggtgaggttgcggataacgctgccgccaagcctctcatcactaccctactccctaagatgattgcacgcatcaacgactggtttgaggaagtgaaagctaagcgcggcaagcgcccgacagccttccagttcctgcaagaaatcaagccggaagccgtagcgtacatcaccattaagaccactctggcttgcctaaccagtgcggacaatacaaccgttcaggctgtagcaagcgcaatcggtcgggccattgaggacgaggctcgcttcggtcgtatccgtgaccttgaagctaagcacttcaagaagaacgttgaggaacaactcaacaagcgcgtagggcacgtctacaagaaagcatttatgcaagttgtcgagcacgacatgctctctaagggtctactcggtggcgaggcgtggtcttcgtggcataaggaagactctattcatgtaggagtacgctgcatcgagatgctcattgagtcaaccggaatggttagcttacaccgccaaaatgctggcgtagtgggtgcagactctgagactatcgaactcgcacctgaatacgctgaggctatcgcaacccgtgcaggtgcgctggctggcatctctccgatgttccaaccttgcgtagttcctcctaagccgtggactggcattactggtggtggctattgggctgcggggcgcaaacccctgcagttagtacgtactcgcagtctggcggcgcttcgccgctatgaagaagtgtcgatgccggaggtcatcaaagcagtcaacattgcgcagaatacagcatggcgtattaacaagaaagttctcgacgtagcgaataccatcacccaatggcagcactgtccagtcgcggatgtgcctgcgatggatcgtggcgaaatgccagctcgtccgttggacatcgataccaacgagattgcacttaaagcgtggaagaaagaagcttccgcgttctaccgcaaagacaaagcacgcatgagccgtcgtctgtcgatggagtttatgttatctcaggcgaacaagtttgcgaattatgaggcaatctggtttccgcaaaacatggattggcgtgggcgcgtgtacgctgtcccgatgttcaatcctcagggcaacgatatgacgaaaggcctgctgacctttgcgcaggagaaacccattggtgaagacggcttctattggctcaagattcatggcgcaaatacagctggagtggataaagtaccgtttccacaacgcatcaaatttgttgaggataaccatacgaatattatggaatgcgcgaaagcaccgctggaaaacacttggtgggcggaacaggactcgccgttctgctttctggcgttctgctttgagtatgctggcgtcatcaatagtggtctgtcgtacaactgtagcttgcctctggcatttgatggtagttgctccggcctgcaacatttctcagcgatgttacgcgacgaaattggcggcaaagctgtgaatctcctcccatctgcggaataccaggatatttatcgtatcgtcagcgacaaagttaacgagatgctgaaacaagatctgattaacggtacctctaccaccgtggaaacggtgactgataaaaagacaggcgaaattacccaacgcacgaaatacgggaccaaagttatggcacagtggtggttagaacacggtgtgaatcgtggcgtcacgaaacgcccggttatgactttggtgtatgggagcaaagagtttggattccgcgatcaagtggtgagtgacaccattcaaccggcgatcgataacggcaagggtgacatgtttctgaatccgaatcaggctgctggttacatggcgaaactgatctggaacgcagtgtccgggaccgtagtcgcagcagttgaggcgatgaactggctgaaaagtgcggcgaaattacttgctgctgaagtgaaggatgagaagacggatacagttctgcgtggccgctgcgcagtacattgggtgactcccgacggcttccctgtgtggcaggaatacaagaagcctattcaaacgcgcttgaacctgatgttcctcggtcagttccgcttacagcctaccattaacaccaacaaagatagcgagattgatgcacgcaaacaggtgtctggtatcgctcctaactttgtacacagcctggacggtaaccaccttcgtatgactgtagtgtgggcacacgagaagtacggaatcgaatcttttgcactgattcacgactccttcggtaccattccggctgacgctgcgaacctgttcaaagcagtgcgcgaaactttcgttgacacatatgagtcttgtgatgtactggctgatttctacgaccagattgctgaccagttgcacgagtctcaacgcgacaaaatgccagcacttccggctaaaggtaagttgaacctccgtgacatcttaaaatcggacttcgcgttcgcg

SEQ ID NO: 1542 - protein, 890 aa, synthetic construct
  REGION 1..890: note = Variant of RNA polymerase
MHHHHHHMNTINIAKNDFSDIELAAIPFNTLADHYGERLAREQLALEHESYEMGEARFRKMFERQLKAGEVADNAAAKPLITTLLPKMIARINDWFEEVKAKRGKRPTAFQFLQEIKPEAVAYITIKTTLACLTSADNTTVQAVASAIGRAIEDEARFGRIRDLEAKHFKKNVEEQLNKRVGHVYKKAFMQVVEHDMLSKGLLGGEAWSSWHKEDSIHVGVRCIEMLIESTGMVSLHRQNAGVVGADSETIELAPEYAEAIATRAGALAGISPMFQPCVVPPKPWTGITGGGYWAAGRKPLQLVRTRSLAALRRYEEVSMPEVIKAVNIAQNTAWRINKKVLDVANTITQWQHCPVADVPAMDRGEMPARPLDIDTNEIALKAWKKEASAFYRKDKARMSRRLSMEFMLSQANKFANYEAIWFPQNMDWRGRVYAVPMFNPQGNDMTKGLLTFAQEKPIGEDGFYWLKIHGANTAGVDKVPFPQRIKFVEDNHTNIMECAKAPLENTWWAEQDSPFCFLAFCFEYAGVINSGLSYNCSLPLAFDGSCSGLQHFSAMLRDEIGGKAVNLLPSAEYQDIYRIVSDKVNEMLKQDLINGTSTTVETVTDKKTGEITQRTKYGTKVMAQWWLEHGVNRGVTKRPVMTLVYGSKEFGFRDQVVSDTIQPAIDNGKGDMFLNPNQAAGYMAKLIWNAVSGTVVAAVEAMNWLKSAAKLLAAEVKDEKTDTVLRGRCAVHWVTPDGFPVWQEYKKPIQTRLNLMFLGQFRLQPTINTNKDSEIDARKQVSGIAPNFVHSLDGNHLRMTVVWAHEKYGIESFALIHDSFGTIPADAANLFKAVRETFVDTYESCDVLADFYDQIADQLHESQRDKMPALPAKGKLNLRDILKSDFAFA

SEQ ID NO: 1543 - DNA, 2670 bp, synthetic construct
  misc_feature 1..2670: note = Variant of RNA polymerase
  source 1..2670: mol_type = other DNA
atgcaccatcaccatcaccatatgaacacgattaacattgctaagaacgacttctctgacatcgaactggctgctatcccgttcaacactctggctgaccattacggtgagcgtttagctcgcgaacagttggcccttgagcatgagtcttacgagatgggtgaagcacgcttccgcaagatgtttgagcgtcaacttaaagctggtgaggttgcggataacgctgccgccaagcctctcatcactaccctactccctaagatgattgcacgcatcaacgactggtttgaggaagtgaaagctaagcgcggcaagcgcccgacagccttccagttcctgcaagaaatcaagccggaagccgtagcgtacatcaccattaagaccactctggcttgcctaaccagtgcggacaatacaaccgttcaggctgtagcaagcgcaatcggtcgggccattgaggacgaggctcgcttcggtcgtatccgtgaccttgaagctaagcacttcaagaagaacgttgaggaacaactcaacaagcgcgtagggcacgtctacaagaaagcatttatgcaagttgtcgagcacgacatgctctctaagggtctactcggtggcgaggcgtggtcttcgtggcataaggaagactctattcatgtaggagtacgctgcatcgagatgctcattgagtcaaccggaatggttagcttacaccgccaaaatgctggcgtagtgggtgcagactctgagactatcgaactcgcacctgaatacgctgaggctatcgcaacccgtgcaggtgcgctggctggcatctctccgatgttccaaccttgcgtagttcctcctaagccgtggactggcattactggtggtggctattgggctgcggggcgcaaacccctgcagttagtacgtactcgcagtctgaaggcgcttcgccgctatgaagaagtgtcgatgccggaggtcatcaaagcagtcaacattgcgcagaatacagcatggcgtattaacaagaaagttctcgacgtagcgaataccatcacccaatggaagcactgtccagtcgccgatattcctgcgatggatcgtggcgaaatgccagctcgcccgttggacatcgataccaacgagattgcacttaaagcgtggaagaaagaagcttccgcgttctaccgcaaagacaaagcacgcatgagccgtcgtctgtcgatggagtttatgttatctcaggcgaacaagtttgcgaattatgaggcaatctggtttccgcaaaacatggattggcgtgggcgcgtgtacgctgtcccgatgttcaatcctcagggcaacgatatgacgaaaggcctgctgacctttgcgcaggagaaacccattggtgaagacggcttctattggctcaagattcatggcgcaaatacagctggagtggataaagtaccgtttccacaacgcatcaaatttgttgaggataaccatacgaatattatggaatgcgcgaaagcaccgctggaaaacacttggtgggcggaacaggactcgccgttctgctttctggcgttctgctttgagtatgctggcgtcatcaatagtggtctgtcgtacaactgtagcttgcctctggcatttgatggtagttgctccggcctgcaacatttctcagcgatgttacgcgacgaagttggcggcaaagctgtgaatctcctcccatctgcggaataccaggatatttatggtatcgtcagcgacaaagttaacgagatgctgaaacaagatctgattaacggtacctctaccaccgtggaaacggtgactgataaaaagacaggcgaaattacccaacgcacgaaatacgggaccaaagttatggcagggtggtggttagaacacggtgtgaatcgtggcgtcacgaaacgcccggttatgactttggtgtatgggagcaaagagtttggattccgcgatcaagtgctgagtgacaccattcaaccggcgatcgataacggcaagggtgacatgtttctgaatccgaatcaggctgctggttacatggcgaaactgatctggaactcggtgtccgggaccgtagtcgcagcagttgaggcgatgaactggctgaaaagtgcggcgaaattacttgctgctgaagtgaaggatgagaagacggatacaattctgcgtggccgctgcgcagtacattgggtgactcccgacggcttccctgtgtggcaggaatacaagaagcctattcaaacgcgcttgaacctgatgttcctcggtcagttccgcttacagcctaccattaacaccaacaaagatagcgagattgatgcacgcaaacaggtgtctggtatcgctcctaactttgtacacagcctggacggtaaccaccttcgtatgactgtagtgtgggcacacgagaagtacggaatcgaatcttttgcactgattcacgactccttcggtaccattccggctgacgctgcgaacctgttcaaagcagtgcgcgaaactttcgttgacacatatgagtcttgtgatgtactggctgatttctacgaccagattgctgaccagttgcacgagtctcaacgcgacaaaatgccagcacttccggctaaaggtaagttgaacctccgtgacatcttaaaatcggacttcgcgttcgcg

SEQ ID NO: 1544 - protein, 890 aa, synthetic construct
  REGION 1..890: note = Variant of RNA polymerase
MHHHHHHMNTINIAKNDFSDIELAAIPFNTLADHYGERLAREQLALEHESYEMGEARFRKMFERQLKAGEVADNAAAKPLITTLLPKMIARINDWFEEVKAKRGKRPTAFQFLQEIKPEAVAYITIKTTLACLTSADNTTVQAVASAIGRAIEDEARFGRIRDLEAKHFKKNVEEQLNKRVGHVYKKAFMQVVEHDMLSKGLLGGEAWSSWHKEDSIHVGVRCIEMLIESTGMVSLHRQNAGVVGADSETIELAPEYAEAIATRAGALAGISPMFQPCVVPPKPWTGITGGGYWAAGRKPLQLVRTRSLKALRRYEEVSMPEVIKAVNIAQNTAWRINKKVLDVANTITQWKHCPVADIPAMDRGEMPARPLDIDTNEIALKAWKKEASAFYRKDKARMSRRLSMEFMLSQANKFANYEAIWFPQNMDWRGRVYAVPMFNPQGNDMTKGLLTFAQEKPIGEDGFYWLKIHGANTAGVDKVPFPQRIKFVEDNHTNIMECAKAPLENTWWAEQDSPFCFLAFCFEYAGVINSGLSYNCSLPLAFDGSCSGLQHFSAMLRDEVGGKAVNLLPSAEYQDIYGIVSDKVNEMLKQDLINGTSTTVETVTDKKTGEITQRTKYGTKVMAGWWLEHGVNRGVTKRPVMTLVYGSKEFGFRDQVLSDTIQPAIDNGKGDMFLNPNQAAGYMAKLIWNSVSGTVVAAVEAMNWLKSAAKLLAAEVKDEKTDTILRGRCAVHWVTPDGFPVWQEYKKPIQTRLNLMFLGQFRLQPTINTNKDSEIDARKQVSGIAPNFVHSLDGNHLRMTVVWAHEKYGIESFALIHDSFGTIPADAANLFKAVRETFVDTYESCDVLADFYDQIADQLHESQRDKMPALPAKGKLNLRDILKSDFAFA

SEQ ID NO: 1545 - DNA, 2670 bp, synthetic construct
  misc_feature 1..2670: note = Variant of RNA polymerase
  source 1..2670: mol_type = other DNA
atgcaccatcaccatcaccatatgaacacgattaacattgctaagaacgacttctctgacatcgaactggctgctatcccgttcaacactctggctgaccattacggtgagcgtttagctcgcgaacagttggcccttgagcatgagtcttacgagatgggtgaagcacgcttccgcaagatgtttgagcgtcaacttaaagctggtgaggttgcggataacgctgccgccaagcctctcatcactaccctactccctaagatgattgcacgcatcaacgactggtttgaggaagtgaaagctaagcgcggcaagcgcccgacagccttccagttcctgcaagaaatcaagccggaagccgtagcgtacatcaccattaagaccactctggcttgcctaaccagtgcggacaatacaaccgttcaggctgtagcaagcgcaatcggtcgggccattgaggacgaggctcgcttcggtcgtatccgtgaccttgaagctaagcacttcaagaagaacgttgaggaacaactcaacaagcgcgtagggcacgtctacaagaaagcatttatgcaagttgtcgagcacgacatgctctctaagggtctactcggtggcgaggcgtggtcttcgtggcataaggaagactctattcatgtaggagtacgctgcatcgagatgctcattgagtcaaccggaatggttagcttacaccgccaaaatgctggcgtagtgggtgcagactctgagactatcgaactcgcacctgaatacgctgaggctatcgcaacccgtgcaggtgcgctggctggcatctctccgatgttccaaccttgcgtagttcctcctaagccgtggactggcattactggtggtggctattgggctgcggggcgcaaacccctgcagttagtacgtactcgcagtctgaaggcgcttcgccgctatgaagaagtgtcgatgccggaggtcatcaaagcagtcaacattgcgcagaatacagcatggcgtattaacaagaaagttctcgacgtagcgaataccatcacccaatggcagcactgtccagtccgtgatgttcctgcgatggatcgtggcgaaatgccagctcgtccgttggacatcgataccaacgagattgcacttaaagcgtggaagaaagaagcttccgcgttctaccgcaaagacaaagcacgcatgagccgtcgtatctcgatggagtttatgttatctcaggcgaacaagtttgcgaattatgaggcaatctggtttccgcaaaacatggattggcgtgggcgcgtgtacgctgtcccgatgttcaatcctcagggcaacgatatgacgaaaggcctgctgacctttgcgcaggagaaacccattggtgaagacggcttctattggctcaagattcatggcgcaaatacagctggagtggataaagtaccgtttccacaacgcatcaaatttgttgaggataaccatacgaatattatggaatgcgcgaaagcaccgctggaaaacacttggtgggcggaacaggactcgccgttctgctttctggcgttctgctttgagtatgctggcgtcatcaatagtggtctgtcgtacaactgtagcttgcctctggcatttgatggtagttgctccggcctgcaacatttctcagcgatgttacgcgacgaaattggcggcaaagctgtgaatctcctcccatctgcggaataccaggatatttatcgtatcgtcagcgacaaagttaacgagatgctgaaacaagatctgattaacggtacctctaccaccgtggaaacggtgactgataaaaagacaggcgaaattacccaacgcacgaaatacgggaccaaagttatggcacaatggtggttagagcacggtgtgaatcgtggcgtcacgaaacgcccggttatgactttggtgtatgggagcaaagagtttggattccgcgatcaagtgctgagtgacaccattcaaccggcgatcgataacggcaagggtgacatgtttctgaatccgaatcaggctgctggttacatggcgaaactgatctggaacgcagtgtccgggaccgtagtcgcagcagttgaggcgatgaactggctgaaaagtgcggcgaaattacttgctgctgaagtgaaggatgagaagacggatacagttctgcgtggccgctgcgcagtacattgggtgactcccgacggcttccctgtgtggcaggaatacaagaagcctattcaaacgcgcttgaacctgatgttcctcggtcagttccgcttacagcctaccattaacaccaacaaagatagcgagattgatgcacgcaaacaggtgtctggtatcgctcctaactttgtacacagcctggacggtaaccaccttcgtatgactgtagtgtgggcacacgagaagtacggaatcgaatcttttgcactgattcacgactccttcggtaccattccggctgacgctgcgaacctgttcaaagcagtgcgcgaaactttcgttgacacatatgagtcttgtgatgtactggctgatttctacgaccagattgctgaccagttgcacgagtctcaacgcgacaaaatgccagcacttccggctaaaggtaagttgaacctccgtgacatcttaaaatcggacttcgcgttcgcg

SEQ ID NO: 1546 - protein, 890 aa, synthetic construct
  REGION 1..890: note = Variant of RNA polymerase
MHHHHHHMNTINIAKNDFSDIELAAIPFNTLADHYGERLAREQLALEHESYEMGEARFRKMFERQLKAGEVADNAAAKPLITTLLPKMIARINDWFEEVKAKRGKRPTAFQFLQEIKPEAVAYITIKTTLACLTSADNTTVQAVASAIGRAIEDEARFGRIRDLEAKHFKKNVEEQLNKRVGHVYKKAFMQVVEHDMLSKGLLGGEAWSSWHKEDSIHVGVRCIEMLIESTGMVSLHRQNAGVVGADSETIELAPEYAEAIATRAGALAGISPMFQPCVVPPKPWTGITGGGYWAAGRKPLQLVRTRSLKALRRYEEVSMPEVIKAVNIAQNTAWRINKKVLDVANTITQWQHCPVRDVPAMDRGEMPARPLDIDTNEIALKAWKKEASAFYRKDKARMSRRISMEFMLSQANKFANYEAIWFPQNMDWRGRVYAVPMFNPQGNDMTKGLLTFAQEKPIGEDGFYWLKIHGANTAGVDKVPFPQRIKFVEDNHTNIMECAKAPLENTWWAEQDSPFCFLAFCFEYAGVINSGLSYNCSLPLAFDGSCSGLQHFSAMLRDEIGGKAVNLLPSAEYQDIYRIVSDKVNEMLKQDLINGTSTTVETVTDKKTGEITQRTKYGTKVMAQWWLEHGVNRGVTKRPVMTLVYGSKEFGFRDQVLSDTIQPAIDNGKGDMFLNPNQAAGYMAKLIWNAVSGTVVAAVEAMNWLKSAAKLLAAEVKDEKTDTVLRGRCAVHWVTPDGFPVWQEYKKPIQTRLNLMFLGQFRLQPTINTNKDSEIDARKQVSGIAPNFVHSLDGNHLRMTVVWAHEKYGIESFALIHDSFGTIPADAANLFKAVRETFVDTYESCDVLADFYDQIADQLHESQRDKMPALPAKGKLNLRDILKSDFAFA

SEQ ID NO: 1547 - DNA, 2670 bp, synthetic construct
  misc_feature 1..2670: note = Variant of RNA polymerase
  source 1..2670: mol_type = other DNA
atgcaccatcaccatcaccatatgaacacgattaacattgctaagaacgacttctctgacatcgaactggctgctatcccgttcaacactctggctgaccattacggtgagcgtttagctcgcgaacagttggcccttgagcatgagtcttacgagatgggtgaagcacgcttccgcaagatgtttgagcgtcaacttaaagctggtgaggttgcggataacgctgccgccaagcctctcatcactaccctactccctaagatgattgcacgcatcaacgactggtttgaggaagtgaaagctaagcgcggcaagcgcccgacagccttccagttcctgcaagaaatcaagccggaagccgtagcgtacatcaccattaagaccactctggcttgcctaaccagtgcggacaatacaaccgttcaggctgtagcaagcgcaatcggtcgggccattgaggacgaggctcgcttcggtcgtatccgtgaccttgaagctaagcacttcaagaagaacgttgaggaacaactcaacaagcgcgtagggcacgtctacaagaaagcatttatgcaagttgtcgagcacgacatgctctctaagggtctactcggtggcgaggcgtggtcttcgtggcataaggaagactctattcatgtaggagtacgctgcatcgagatgctcattgagtcaaccggaatggttagcttacaccgccaaaatgctggcgtagtgggtgcagactctgagactatcgaactcgcacctgaatacgctgaggctatcgcaacccgtgcaggtgcgctggctggcatctctccgatgttccaaccttgcgtagttcctcctaagccgtggactggcattactggtggtggctattgggctgcggggcgcaaacccctgcagttagtacgtactcgcagtctgaaggcgcttcgccgctatgaagaagtgtcgatgccggaggtcatcaaagcagtcaacattgcgcagaatacagcatggcgtattaacaagaaagttctcgacgtagcgaataccatcacccaatggaagcactgtccagtcgcggatgtgcctgcgatggatcgtggcgaaatgccagctcgtccgttggacatcgataccaacgagattgcacttaaagcgtggaagaaagaagcttccgcgttctaccgcaaagacaaagcacgcatgagccgtcgtatctcgatggagtttatgttatctcaggcgaacaagtttgcgaattatgaggcaatctggtttccgcaaaacatggattggcgtgggcgcgtgtacgctgtcccgatgttcaatcctcagggcaacgatatgacgaaaggcctgctgacctttgcgcaggagaaacccattggtgaagacggcttctattggctcaagattcatggcgcaaatacagctggagtggataaagtaccgtttccacaacgcatcaaatttgttgaggataaccatacgaatattatggaatgcgcgaaagcaccgctggaaaacacttggtgggcggaacaggactcgccgttctgctttctggcgttctgctttgagtatgctggcgtcatcaatagtggtctgtcgtacaactgtagcttgcctctggcatttgatggtagttgctccggcctgcaacatttctcagcgatgttacgcgacgaaattggcggcaaagctgtgaatctcctcccatctgcggaataccaggatatttatggtatcgtcagcgacaaagttaacgagatgctgaaacaagatctgattaacggtacctctaccaccgtggaaacggtgactgataaaaagacaggcgaaattacccaacgcacgaaatacgggaccaaagttatggcacagtggtggttagcgcacggtgtgaaccgtggcgtcacgaaacgcccggttatgactttggtgtatgggagcaaagagtttggattccgcgatcaagtgctgagtgacaccattcaaccggcgatcgataacggcaagggtgacatgtttctgaatccgaatcaggctgctggttacatggcgaaactgatctggaacgcagtgtccgggaccgtagtcgcagcagttgaggcgatgaactggctgaaaagtgcggcgaaattacttgctgctgaagtgaaggatgagaagacggatacagttctgcgtggccgctgcgcagtacattgggtgactcccgacggcttccctgtgtggcaggaatacaagaagcctattcaaacgcgcttgaacctgatgttcctcggtcagttccgcttacagcctaccattaacaccaacaaagatagcgagattgatgcacgcaaacaggtgtctggtatcgctcctaactttgtacacagcctggacggtaaccaccttcgtatgactgtagtgtgggcacacgagaagtacggaatcgaatcttttgcactgattcacgactccttcggtaccattccggctgacgctgcgaacctgttcaaagcagtgcgcgaaactttcgttgacacatatgagtcttgtgatgtactggctgatttctacgaccagattgctgaccagttgcacgagtctcaacgcgacaaaatgccagcacttccggctaaaggtaagttgaacctccgtgacatcttaaaatcggacttcgcgttcgcg

SEQ ID NO: 1548 - protein, 890 aa, synthetic construct
  REGION 1..890: note = Variant of RNA polymerase
MHHHHHHMNTINIAKNDFSDIELAAIPFNTLADHYGERLAREQLALEHESYEMGEARFRKMFERQLKAGEVADNAAAKPLITTLLPKMIARINDWFEEVKAKRGKRPTAFQFLQEIKPEAVAYITIKTTLACLTSADNTTVQAVASAIGRAIEDEARFGRIRDLEAKHFKKNVEEQLNKRVGHVYKKAFMQVVEHDMLSKGLLGGEAWSSWHKEDSIHVGVRCIEMLIESTGMVSLHRQNAGVVGADSETIELAPEYAEAIATRAGALAGISPMFQPCVVPPKPWTGITGGGYWAAGRKPLQLVRTRSLKALRRYEEVSMPEVIKAVNIAQNTAWRINKKVLDVANTITQWKHCPVADVPAMDRGEMPARPLDIDTNEIALKAWKKEASAFYRKDKARMSRRISMEFMLSQANKFANYEAIWFPQNMDWRGRVYAVPMFNPQGNDMTKGLLTFAQEKPIGEDGFYWLKIHGANTAGVDKVPFPQRIKFVEDNHTNIMECAKAPLENTWWAEQDSPFCFLAFCFEYAGVINSGLSYNCSLPLAFDGSCSGLQHFSAMLRDEIGGKAVNLLPSAEYQDIYGIVSDKVNEMLKQDLINGTSTTVETVTDKKTGEITQRTKYGTKVMAQWWLAHGVNRGVTKRPVMTLVYGSKEFGFRDQVLSDTIQPAIDNGKGDMFLNPNQAAGYMAKLIWNAVSGTVVAAVEAMNWLKSAAKLLAAEVKDEKTDTVLRGRCAVHWVTPDGFPVWQEYKKPIQTRLNLMFLGQFRLQPTINTNKDSEIDARKQVSGIAPNFVHSLDGNHLRMTVVWAHEKYGIESFALIHDSFGTIPADAANLFKAVRETFVDTYESCDVLADFYDQIADQLHESQRDKMPALPAKGKLNLRDILKSDFAFA

SEQ ID NO: 1549 - DNA, 2670 bp, synthetic construct
  misc_feature 1..2670: note = Variant of RNA polymerase
  source 1..2670: mol_type = other DNA
atgcaccatcaccatcaccatatgaacacgattaacattgctaagaacgacttctctgacatcgaactggctgctatcccgttcaacactctggctgaccattacggtgagcgtttagctcgcgaacagttggcccttgagcatgagtcttacgagatgggtgaagcacgcttccgcaagatgtttgagcgtcaacttaaagctggtgaggttgcggataacgctgccgccaagcctctcatcactaccctactccctaagatgattgcacgcatcaacgactggtttgaggaagtgaaagctaagcgcggcaagcgcccgacagccttccagttcctgcaagaaatcaagccggaagccgtagcgtacatcaccattaagaccactctggcttgcctaaccagtgcggacaatacaaccgttcaggctgtagcaagcgcaatcggtcgggccattgaggacgaggctcgcttcggtcgtatccgtgaccttgaagctaagcacttcaagaagaacgttgaggaacaactcaacaagcgcgtagggcacgtctacaagaaagcatttatgcaagttgtcgagcacgacatgctctctaagggtctactcggtggcgaggcgtggtcttcgtggcataaggaagactctattcatgtaggagtacgctgcatcgagatgctcattgagtcaaccggaatggttagcttacaccgccaaaatgctggcgtagtgggtgcagactctgagactatcgaactcgcacctgaatacgctgaggctatcgcaacccgtgcaggtgcgctggctggcatctctccgatgttccaaccttgcgtagttcctcctaagccgtggactggcattactggtggtggctattgggctgcggggcgcaaacccctgcagttagtacgtactcgcagtctgaaggcgcttcgccgctatgaagaagtgtcgatgccggaggtcatcaaagcagtcaacattgcgcagaatacagcatggcgtattaacaagaaagttctcgacgtagcgaataccatcacccaatggaagcactgtccagtcgcggatgtgcctgcgatggatcgtggcgaaatgccagctcgtccgttggacatcgataccaaccctattgcacttaaagcgtggaagaaagaagcttccgcgttctaccgcaaagacaaagcacgcatgagccgtcgtctgtcgatggagtttatgttatctcaggcgaacaagtttgcgaattatgaggcaatctggtttccgcaaaacatggattggcgtgggcgcgtgtacgctgtcccgatgttcaatcctcagggcaacgatatgacgaaaggcctgctgacctttgcgcaggagaaacccattggtgaagacggcttctattggctcaagattcatggcgcaaatacagctggagtggataaagtaccgtttccacaacgcatcaaatttattgaggataaccatacgaatattatggaatgcgcgaaagcaccgctggaaaacacttggtgggcggaacaggactcgccgttctgctttctggcgttctgctttgagtatgctggcgtcatcaatagtggtctgtcgtacaactgtagcttgcctctggcatttgatggtagttgctccggcctgcaacatttctcagcgatgttacgcgacgaaattggcggcaaagctgtgaatctcctcccatctgcggaataccaggatatttatggtatcgtcagcgacaaagttaacgagatgctgaaacaagatctgattaacggtacctctaccaccgtggaaacggtgactgataaaaagacaggcgaaattacccaacgcacgaaatacgggaccaaagttatggcacaatggtggttagcgcacggtgtgacccgtggcgtcacgaaacgcccggttatgactttggtgtatgggagcaaagagtttggattccgcgatcaagtgctgagtgacaccattcaaccggcgatcgataacggcaagggtgacatgtttctgaatccgaatcaggctgctggttacatggcgaaactgatctggaacgcagtgtccgggaccgtagtcgcagcagttgaggcgatgaactggctgaaaagtgcggcgaaattacttgctgctgaagtgaaggatgagaagacggatacagttctgcgtggccgctgcgcagtacattgggtgactcccgacggcttccctgtgtggcaggaatacaagaagcctattcaaacgcgcttgaacctgatgttcctcggtcagttccgcttacagcctaccattaacaccaacaaagatagcgagattgatgcacgcaaacaggtgtctggtatcgctcctaactttgtacacagcctggacggtaaccaccttcgtatgactgtagtgtgggcacacgagaagtacggaatcgaatcttttgcactgattcacgactccttcggtaccattccggctgacgctgcgaacctgttcaaagcagtgcgcgaaactttcgttgacacatatgagtcttgtgatgtactggctgatttctacgaccagattgctgaccagttgcacgagtctcaacgcgacaaaatgccagcacttccggctaaaggtaagttgaacctccgtgacatcttaaaatcggacttcgcgttcgcg

SEQ ID NO: 1550 - protein, 890 aa, synthetic construct
  REGION 1..890: note = Variant of RNA polymerase
MHHHHHHMNTINIAKNDFSDIELAAIPFNTLADHYGERLAREQLALEHESYEMGEARFRKMFERQLKAGEVADNAAAKPLITTLLPKMIARINDWFEEVKAKRGKRPTAFQFLQEIKPEAVAYITIKTTLACLTSADNTTVQAVASAIGRAIEDEARFGRIRDLEAKHFKKNVEEQLNKRVGHVYKKAFMQVVEHDMLSKGLLGGEAWSSWHKEDSIHVGVRCIEMLIESTGMVSLHRQNAGVVGADSETIELAPEYAEAIATRAGALAGISPMFQPCVVPPKPWTGITGGGYWAAGRKPLQLVRTRSLKALRRYEEVSMPEVIKAVNIAQNTAWRINKKVLDVANTITQWKHCPVADVPAMDRGEMPARPLDIDTNPIALKAWKKEASAFYRKDKARMSRRLSMEFMLSQANKFANYEAIWFPQNMDWRGRVYAVPMFNPQGNDMTKGLLTFAQEKPIGEDGFYWLKIHGANTAGVDKVPFPQRIKFIEDNHTNIMECAKAPLENTWWAEQDSPFCFLAFCFEYAGVINSGLSYNCSLPLAFDGSCSGLQHFSAMLRDEIGGKAVNLLPSAEYQDIYGIVSDKVNEMLKQDLINGTSTTVETVTDKKTGEITQRTKYGTKVMAQWWLAHGVTRGVTKRPVMTLVYGSKEFGFRDQVLSDTIQPAIDNGKGDMFLNPNQAAGYMAKLIWNAVSGTVVAAVEAMNWLKSAAKLLAAEVKDEKTDTVLRGRCAVHWVTPDGFPVWQEYKKPIQTRLNLMFLGQFRLQPTINTNKDSEIDARKQVSGIAPNFVHSLDGNHLRMTVVWAHEKYGIESFALIHDSFGTIPADAANLFKAVRETFVDTYESCDVLADFYDQIADQLHESQRDKMPALPAKGKLNLRDILKSDFAFA

SEQ ID NO: 1551 - DNA, 2670 bp, synthetic construct
  misc_feature 1..2670: note = Variant of RNA polymerase
  source 1..2670: mol_type = other DNA
atgcaccatcaccatcaccatatgaacacgattaacattgctaagaacgacttctctgacatcgaactggctgctatcccgttcaacactctggctgaccattacggtgagcgtttagctcgcgaacagttggcccttgagcatgagtcttacgagatgggtgaagcacgcttccgcaagatgtttgagcgtcaacttaaagctggtgaggttgcggataacgctgccgccaagcctctcatcactaccctactccctaagatgattgcacgcatcaacgactggtttgaggaagtgaaagctaagcgcggcaagcgcccgacagccttccagttcctgcaagaaatcaagccggaagccgtagcgtacatcaccattaagaccactctggcttgcctaaccagtgcggacaatacaaccgttcaggctgtagcaagcgcaatcggtcgggccattgaggacgaggctcgcttcggtcgtatccgtgaccttgaagctaagcacttcaagaagaacgttgaggaacaactcaacaagcgcgtagggcacgtctacaagaaagcatttatgcaagttgtcgagcacgacatgctctctaagggtctactcggtggcgaggcgtggtcttcgtggcataaggaagactctattcatgtaggagtacgctgcatcgagatgctcattgagtcaaccggaatggttagcttacaccgccaaaatgctggcgtagtgggtgcagactctgagactatcgaactcgcacctgaatacgctgaggctatcgcaacccgtgcaggtgcgctggctggcatctctccgatgttccaaccttgcgtagttcctcctaagccgtggactggcattactggtggtggctattgggctgcggggcgcaaacccctgcagttagtacgtactcgcagtctggcggcgcttcgccgctatgaagaagtgtcgatgccggaggtcatcaaagcagtcaacattgcgcagaatacagcatggcgtattaacaagaaagttctcgacgtagcgaataccatcacccaatggcagcactgtccagtcgcggatgtgcctgcgatggatcgtggcgaaatgccagctcgtccgttggacatcgataccaacgagattgcacttaaagcgtggaagaaagaagcttccgcgttctaccgcaaagacaaagcacgcatgagccgtcgtctgtcgatggagtttatgttatctcaggcgaacaagtttgcgaattatgaggcaatctggtttccgcaaaacatggattggcgtgggcgcgtgtacgctgtcccgatgttcaatcctcagggcaacgatatgacgaaaggcctgctgacctttgcgcaggagaaacccattggtgaagacggcttctattggctcaagattcatggcgcaaatacagctggagtggataaagtaccgtttccacaacgcatcaaatttgttgaggataaccatacgaatattatggaatgcgcgaaagcaccgctggaaaacacttggtgggcggaacaggactcgccgttctgctttctggcgttctgctttgagtatgctggcgtcatcaatagtggtctgtcgtacaactgtagcttgcctctggcatttgatggtagttgctccggcctgcaacatttctcagcgatgttacgcgacgaaattggcggcaaagctgtgaatctcctcccatctgcggaataccaggatatttatcgtatcgtcagcgacaaagttaacgagatgctgaaacaagatctgattaacggtacctctaccaccgtggaaacggtgactgataaaaagacaggcgaaattacccaacgcacgaaatacgggaccaaagttatggcagggtggtggttagaacacggtgtgaatcgtggcgtcacgaaacgcccggttatgactttggtgtatgggagcaaagagtttggattccgcgatcaagtgctgagtgacaccattcaaccggcgatcgataacggcaagggtgacatgtttctgaatccgaatcaggctgctggttacatggcgaaactgatctggaacgcagtgtccgggaccgtagtcgcagcagttgaggcgatgaactggctgaaaagtgcggcgaaattacttgctgctgaagtgaaggatgagaagacggatacagttctgcgtggccgctgcgcagtacattgggtgactcccgacggcttccctgtgtggcaggaatacaagaagcctattcaaacgcgcttgaacctgatgttcctcggtcagttccgcttacagcctaccattaacaccaacaaagatagcgagattgatgcacgcaaacaggtgtctggtatcgctcctaactttgtacacagcctggacggtaaccaccttcgtatgactgtagtgtgggcacacgagaagtacggaatcgaatcttttgcactgattcacgactccttcggtaccattccggctgacgctgcgaacctgttcaaagcagtgcgcgaaactttcgttgacacatatgagtcttgtgatgtactggctgatttctacgaccagattgctgaccagttgcacgagtctcaacgcgacaaaatgccagcacttccggctaaaggtaagttgaacctccgtgacatcttaaaatcggacttcgcgttcgcg

SEQ ID NO: 1552 - protein, 890 aa, synthetic construct
  REGION 1..890: note = Variant of RNA polymerase
MHHHHHHMNTINIAKNDFSDIELAAIPFNTLADHYGERLAREQLALEHESYEMGEARFRKMFERQLKAGEVADNAAAKPLITTLLPKMIARINDWFEEVKAKRGKRPTAFQFLQEIKPEAVAYITIKTTLACLTSADNTTVQAVASAIGRAIEDEARFGRIRDLEAKHFKKNVEEQLNKRVGHVYKKAFMQVVEHDMLSKGLLGGEAWSSWHKEDSIHVGVRCIEMLIESTGMVSLHRQNAGVVGADSETIELAPEYAEAIATRAGALAGISPMFQPCVVPPKPWTGITGGGYWAAGRKPLQLVRTRSLAALRRYEEVSMPEVIKAVNIAQNTAWRINKKVLDVANTITQWQHCPVADVPAMDRGEMPARPLDIDTNEIALKAWKKEASAFYRKDKARMSRRLSMEFMLSQANKFANYEAIWFPQNMDWRGRVYAVPMFNPQGNDMTKGLLTFAQEKPIGEDGFYWLKIHGANTAGVDKVPFPQRIKFVEDNHTNIMECAKAPLENTWWAEQDSPFCFLAFCFEYAGVINSGLSYNCSLPLAFDGSCSGLQHFSAMLRDEIGGKAVNLLPSAEYQDIYRIVSDKVNEMLKQDLINGTSTTVETVTDKKTGEITQRTKYGTKVMAGWWLEHGVNRGVTKRPVMTLVYGSKEFGFRDQVLSDTIQPAIDNGKGDMFLNPNQAAGYMAKLIWNAVSGTVVAAVEAMNWLKSAAKLLAAEVKDEKTDTVLRGRCAVHWVTPDGFPVWQEYKKPIQTRLNLMFLGQFRLQPTINTNKDSEIDARKQVSGIAPNFVHSLDGNHLRMTVVWAHEKYGIESFALIHDSFGTIPADAANLFKAVRETFVDTYESCDVLADFYDQIADQLHESQRDKMPALPAKGKLNLRDILKSDFAFA

SEQ ID NO: 1553 - DNA, 2670 bp, synthetic construct
  misc_feature 1..2670: note = Variant of RNA polymerase
  source 1..2670: mol_type = other DNA
atgcaccatcaccatcaccatatgaacacgattaacattgctaagaacgacttctctgacatcgaactggctgctatcccgttcaacactctggctgaccattacggtgagcgtttagctcgcgaacagttggcccttgagcatgagtcttacgagatgggtgaagcacgcttccgcaagatgtttgagcgtcaacttaaagctggtgaggttgcggataacgctgccgccaagcctctcatcactaccctactccctaagatgattgcacgcatcaacgactggtttgaggaagtgaaagctaagcgcggcaagcgcccgacagccttccagttcctgcaagaaatcaagccggaagccgtagcgtacatcaccattaagaccactctggcttgcctaaccagtgcggacaatacaaccgttcaggctgtagcaagcgcaatcggtcgggccattgaggacgaggctcgcttcggtcgtatccgtgaccttgaagctaagcacttcaagaagaacgttgaggaacaactcaacaagcgcgtagggcacgtctacaagaaagcatttatgcaagttgtcgagcacgacatgctctctaagggtctactcggtggcgaggcgtggtcttcgtggcataaggaagactctattcatgtaggagtacgctgcatcgagatgctcattgagtcaaccggaatggttagcttacaccgccaaaatgctggcgtagtgggtgcagactctgagactatcgaactcgcacctgaatacgctgaggctatcgcaacccgtgcaggtgcgctggctggcatctctccgatgttccaaccttgcgtagttcctcctaagccgtggactggcattactggtggtggctattgggctgcggggcgcaaacccctgcagttagtacgtactcgcagtctgaaggcgcttcgccgctatgaagaagtgtcgatgccggaggtcatcaaagcagtcaacattgcgcagaatacagcatggcgtattaacaagaaagttctcgacgtagcgaataccatcacccaatggaagcactgtccagtcgcggatgtgcctgcgatggatcgtggcgaaatgccagctcgtccgttggacatcgataccaaccctattgcacttaaagcgtggaagaaagaagcttccgcgttctaccgccgcgacaaagcacgcatgagccgtcgtatctcgatggagtttatgttatctcaggcgaacaagtttgcgaattatgaggcaatctggtttccgcaaaacatggattggcgtgggcgcgtgtacgctgtcccgatgttcaatcctcagggcaacgatatgacgaaaggcctgctgacctttgcgcaggagaaacccattggtgaagacggcttctattggctcaagattcatggcgcaaatacagctggagtggataaagtaccgtttccacaacgcatcaaatttgttgaggataaccatacgaatattatggaatgcgcgaaagcaccgctggaaaacacttggtgggcggaacaggactcgccgttctgctttctggcgttctgctttgagtatgctggcgtcatcaatagtggtctgtcgtacaactgtagcttgcctctggcatttgatggtagttgctccggcctgcaacatttctcagcgatgttacgcgacgaaattggcggcaaagctgtgaatctcctcccatctgcggaataccaggatatttatcgtatcgtcagcgacaaagttaacgagatgctgaaacaagatctgattaacggtacctctaccaccgtggaaacggtgactgataaaaagacaggcgaaattacccaacgcacgaaatacgggaccaaagttatggcacagtggtggttagaacacggtgtgaatcgtggcgtcacgaaacgcccggttatgactttggtgtatgggagcaaagagtttggattccgcgatcaagtgctgagtgacaccattcaaccggcgatcgataacggcaagggtgacatgtttctgaatccgaatcaggctgctggttacatggcgaaactgatctggaactcggtgtccgggaccgtagtcgcagcagttgaggcgatgaactggctgaaaagtgcggcgaaattacttgctgctgaagtgaaggatgagaagacggatacaattctgcgtggccgctgcgcagtacattgggtgactcccgacggcttccctgtgtggcaggaatacaagaagcctattcaaacgcgcttgaacctgatgttcctcggtcagttccgcttacagcctaccattaacaccaacaaagatagcgagattgatgcacgcaaacaggtgtctggtatcgctcctaactttgtacacagcctggacggtaaccaccttcgtatgactgtagtgtgggcacacgagaagtacggaatcgaatcttttgcactgattcacgactccttcggtaccattccggctgacgctgcgaacctgttcaaagcagtgcgcgaaactttcgttgacacatatgagtcttgtgatgtactggctgatttctacgaccagattgctgaccagttgcacgagtctcaacgcgacaaaatgccagcacttccggctaaaggtaagttgaacctccgtgacatcttaaaatcggacttcgcgttcgcg

SEQ ID NO: 1554 - protein, 890 aa, synthetic construct
  REGION 1..890: note = Variant of RNA polymerase
MHHHHHHMNTINIAKNDFSDIELAAIPFNTLADHYGERLAREQLALEHESYEMGEARFRKMFERQLKAGEVADNAAAKPLITTLLPKMIARINDWFEEVKAKRGKRPTAFQFLQEIKPEAVAYITIKTTLACLTSADNTTVQAVASAIGRAIEDEARFGRIRDLEAKHFKKNVEEQLNKRVGHVYKKAFMQVVEHDMLSKGLLGGEAWSSWHKEDSIHVGVRCIEMLIESTGMVSLHRQNAGVVGADSETIELAPEYAEAIATRAGALAGISPMFQPCVVPPKPWTGITGGGYWAAGRKPLQLVRTRSLKALRRYEEVSMPEVIKAVNIAQNTAWRINKKVLDVANTITQWKHCPVADVPAMDRGEMPARPLDIDTNPIALKAWKKEASAFYRRDKARMSRRISMEFMLSQANKFANYEAIWFPQNMDWRGRVYAVPMFNPQGNDMTKGLLTFAQEKPIGEDGFYWLKIHGANTAGVDKVPFPQRIKFVEDNHTNIMECAKAPLENTWWAEQDSPFCFLAFCFEYAGVINSGLSYNCSLPLAFDGSCSGLQHFSAMLRDEIGGKAVNLLPSAEYQDIYRIVSDKVNEMLKQDLINGTSTTVETVTDKKTGEITQRTKYGTKVMAQWWLEHGVNRGVTKRPVMTLVYGSKEFGFRDQVLSDTIQPAIDNGKGDMFLNPNQAAGYMAKLIWNSVSGTVVAAVEAMNWLKSAAKLLAAEVKDEKTDTILRGRCAVHWVTPDGFPVWQEYKKPIQTRLNLMFLGQFRLQPTINTNKDSEIDARKQVSGIAPNFVHSLDGNHLRMTVVWAHEKYGIESFALIHDSFGTIPADAANLFKAVRETFVDTYESCDVLADFYDQIADQLHESQRDKMPALPAKGKLNLRDILKSDFAFA

SEQ ID NO: 1555 - DNA, 2670 bp, synthetic construct
  misc_feature 1..2670: note = Variant of RNA polymerase
  source 1..2670: mol_type = other DNA
atgcaccatcaccatcaccatatgaacacgattaacattgctaagaacgacttctctgacatcgaactggctgctatcccgttcaacactctggctgaccattacggtgagcgtttagctcgcgaacagttggcccttgagcatgagtcttacgagatgggtgaagcacgcttccgcaagatgtttgagcgtcaacttaaagctggtgaggttgcggataacgctgccgccaagcctctcatcactaccctactccctaagatgattgcacgcatcaacgactggtttgaggaagtgaaagctaagcgcggcaagcgcccgacagccttccagttcctgcaagaaatcaagccggaagccgtagcgtacatcaccattaagaccactctggcttgcctaaccagtgcggacaatacaaccgttcaggctgtagcaagcgcaatcggtcgggccattgaggacgaggctcgcttcggtcgtatccgtgaccttgaagctaagcacttcaagaagaacgttgaggaacaactcaacaagcgcgtagggcacgtctacaagaaagcatttatgcaagttgtcgagcacgacatgctctctaagggtctactcggtggcgaggcgtggtcttcgtggcataaggaagactctattcatgtaggagtacgctgcatcgagatgctcattgagtcaaccggaatggttagcttacaccgccaaaatgctggcgtagtgggtgcagactctgagactatcgaactcgcacctgaatacgctgaggctatcgcaacccgtgcaggtgcgctggctggcatctctccgatgttccaaccttgcgtagttcctcctaagccgtggactggcattactggtggtggctattgggctgcggggcgcaaacccctgcagttagtacgtactcgcagtctgaaggcgcttcgccgctatgaagaagtgtcgatgccggaggtcatcaaagcagtcaacattgcgcagaatacagcatggcgtattaacaagaaagttctcgacgtagcgaataccatcacccaatggcagcactgtccagtccgtgatattcctgcgatggatcgtggcgaaatgccagctcgtccgttggacatcgataccaacgagattgcacttaaagcgtggaagaaagaagcttccgcgttctaccgcaaagacaaagcacgcatgagccgtcgtatctcgatggagtttatgttatctcaggcgaacaagtttgcgaattatgaggcaatctggtttccgcaaaacatggattggcgtgggcgcgtgtacgctgtcccgatgttcaatcctcagggcaacgatatgacgaaaggcctgctgacctttgcgcaggagaaacccattggtgaagacggcttctattggctcaagattcatggcgcaaatacagctggagtggataaagtaccgtttccacaacgcatcaaatttgttgaggataaccatacgaatattatggaatgcgcgaaagcaccgctggaaaacacttggtgggcggaacaggactcgccgttctgctttctggcgttctgctttgagtatgctggcgtcatcaatagtggtctgtcgtacaactgtagcttgcctctggcatttgatggtagttgctccggcctgcaacatttctcagcgatgttacgcgacgaaattggcggcaaagctgtgaatctcctcccatctgcggaataccaggatatttatcgtatcgtcagcgacaaagttaacgagatgctgaaacaagatctgattaacggtacctctaccaccgtggaaacggtgactgataaaaagacaggcgaaattacccaacgcacgaaatacgggaccaaagttatggcacagtggtggttagaacacggtgtgaatcgtggcgtcacgaaacgcccggttatgactttggtgtatgggagcaaagagtttggattccgcgatcaagtgctgagtgacaccattcaaccggcgatcgataacggcaagggtgacatgtttctgaatccgaatcaggctgctggttacatggcgaaactgatctggaacgcagtgtccgggaccgtagtcgcagcagttgaggcgatgaactggctgaaaagtgcggcgaaattacttgctgctgaagtgaaggatgagaagacggatacagttctgcgtggccgctgcgcagtacattgggtgactcccgacggcttccctgtgtggcaggaatacaagaagcctattcaaacgcgcttgaacctgatgttcctcggtcagttccgcttacagcctaccattaacaccaacaaagatagcgagattgatgcacgcaaacaggtgtctggtatcgctcctaactttgtacacagcctggacggtaaccaccttcgtatgactgtagtgtgggcacacgagaagtacggaatcgaatcttttgcactgattcacgactccttcggtaccattccggctgacgctgcgaacctgttcaaagcagtgcgcgaaactttcgttgacacatatgagtcttgtgatgtactggctgatttctacgaccagattgctgaccagttgcacgagtctcaacgcgacaaaatgccagcacttccggctaaaggtaagttgaacctccgtgacatcttaaaatcggacttcgcgttcgcg

SEQ ID NO: 1556 - protein, 890 aa, synthetic construct
  REGION 1..890: note = Variant of RNA polymerase
MHHHHHHMNTINIAKNDFSDIELAAIPFNTLADHYGERLAREQLALEHESYEMGEARFRKMFERQLKAGEVADNAAAKPLITTLLPKMIARINDWFEEVKAKRGKRPTAFQFLQEIKPEAVAYITIKTTLACLTSADNTTVQAVASAIGRAIEDEARFGRIRDLEAKHFKKNVEEQLNKRVGHVYKKAFMQVVEHDMLSKGLLGGEAWSSWHKEDSIHVGVRCIEMLIESTGMVSLHRQNAGVVGADSETIELAPEYAEAIATRAGALAGISPMFQPCVVPPKPWTGITGGGYWAAGRKPLQLVRTRSLKALRRYEEVSMPEVIKAVNIAQNTAWRINKKVLDVANTITQWQHCPVRDIPAMDRGEMPARPLDIDTNEIALKAWKKEASAFYRKDKARMSRRISMEFMLSQANKFANYEAIWFPQNMDWRGRVYAVPMFNPQGNDMTKGLLTFAQEKPIGEDGFYWLKIHGANTAGVDKVPFPQRIKFVEDNHTNIMECAKAPLENTWWAEQDSPFCFLAFCFEYAGVINSGLSYNCSLPLAFDGSCSGLQHFSAMLRDEIGGKAVNLLPSAEYQDIYRIVSDKVNEMLKQDLINGTSTTVETVTDKKTGEITQRTKYGTKVMAQWWLEHGVNRGVTKRPVMTLVYGSKEFGFRDQVLSDTIQPAIDNGKGDMFLNPNQAAGYMAKLIWNAVSGTVVAAVEAMNWLKSAAKLLAAEVKDEKTDTVLRGRCAVHWVTPDGFPVWQEYKKPIQTRLNLMFLGQFRLQPTINTNKDSEIDARKQVSGIAPNFVHSLDGNHLRMTVVWAHEKYGIESFALIHDSFGTIPADAANLFKAVRETFVDTYESCDVLADFYDQIADQLHESQRDKMPALPAKGKLNLRDILKSDFAFA

SEQ ID NO: 1557 - DNA, 2670 bp, synthetic construct
  misc_feature 1..2670: note = Variant of RNA polymerase
  source 1..2670: mol_type = other DNA
atgcaccatcaccatcaccatatgaacacgattaacattgctaagaacgacttctctgacatcgaactggctgctatcccgttcaacactctggctgaccattacggtgagcgtttagctcgcgaacagttggcccttgagcatgagtcttacgagatgggtgaagcacgcttccgcaagatgtttgagcgtcaacttaaagctggtgaggttgcggataacgctgccgccaagcctctcatcactaccctactccctaagatgattgcacgcatcaacgactggtttgaggaagtgaaagctaagcgcggcaagcgcccgacagccttccagttcctgcaagaaatcaagccggaagccgtagcgtacatcaccattaagaccactctggcttgcctaaccagtgcggacaatacaaccgttcaggctgtagcaagcgcaatcggtcgggccattgaggacgaggctcgcttcggtcgtatccgtgaccttgaagctaagcacttcaagaagaacgttgaggaacaactcaacaagcgcgtagggcacgtctacaagaaagcatttatgcaagttgtcgagcacgacatgctctctaagggtctactcggtggcgaggcgtggtcttcgtggcataaggaagactctattcatgtaggagtacgctgcatcgagatgctcattgagtcaaccggaatggttagcttacaccgccaaaatgctggcgtagtgggtgcagactctgagactatcgaactcgcacctgaatacgctgaggctatcgcaacccgtgcaggtgcgctggctggcatctctccgatgttccaaccttgcgtagttcctcctaagccgtggactggcattactggtggtggctattgggctgcggggcgcaaacccctgcagttagtacgtactcgcagtctgaaggcgcttcgccgctatgaagaagtgtcgatgccggaggtcatcaaagcagtcaacattgcgcagaatacagcatggcgtattaacaagaaagttctcgacgtagcgaataccatcacccaatggaagcactgtccagtcgccgatattcctgcgatggatcgtggcgaaatgccagctcgcccgttggacatcgataccaacgagattgcacttaaagcgtggaagaaagaagcttccgcgttctaccgcaaagacaaagcacgcatgagccgtcgtatctcgatggagtttatgttatctcaggcgaacaagtttgcgaattatgaggcaatctggtttccgcaaaacatggattggcgtgggcgcgtgtacgctgtcccgatgttcaatcctcagggcaacgatatgacgaaaggcctgctgacctttgcgcaggagaaacccattggtgaagacggcttctattggctcaagattcatggcgcaaatacagctggagtggataaagtaccgtttccacaacgcatcaaatttgttgaggataaccatacgaatattatggaatgcgcgaaagcaccgctggaaaacacttggtgggcggaacaggactcgccgttctgctttctggcgttctgctttgagtatgctggcgtcatcaatagtggtctgtcgtacaactgtagcttgcctctggcatttgatggtagttgctccggcctgcaacatttctcagcgatgttacgcgacgaaattggcggcaaagctgtgaatctcctcccatctgcggaataccaggatatttatggtatcgtcagcgacaaagttaacgagatgctgaaacaagatctgattaacggtacctctaccaccgtggaaacggtgactgataaaaagacaggcgaaattacccaacgcacgaaatacgggaccaaagttatggcagggtggtggttagaacacggtgtgaatcgtggcgtcacgaaacgcccggttatgactttggtgtatgggagcaaagagtttggattccgcgatcaagtgctgagtgacaccattcaaccggcgatcgataacggcaagggtgacatgtttctgaatccgaatcaggctgctggttacatggcgaaactgatctggaacgcagtgtccgggaccgtagtcgcagcagttgaggcgatgaactggctgaaaagtgcggcgaaattacttgctgctgaagtgaaggatgagaagacggatacagttctgcgtggccgctgcgcagtacattgggtgactcccgacggcttccctgtgtggcaggaatacaagaagcctattcaaacgcgcttgaacctgatgttcctcggtcagttccgcttacagcctaccattaacaccaacaaagatagcgagattgatgcacgcaaacaggtgtctggtatcgctcctaactttgtacacagcctggacggtaaccaccttcgtatgactgtagtgtgggcacacgagaagtacggaatcgaatcttttgcactgattcacgactccttcggtaccattccggctgacgctgcgaacctgttcaaagcagtgcgcgaaactttcgttgacacatatgagtcttgtgatgtactggctgatttctacgaccagattgctgaccagttgcacgagtctcaacgcgacaaaatgccagcacttccggctaaaggtaagttgaacctccgtgacatcttaaaatcggacttcgcgttcgcg

SEQ ID NO: 1558 - protein, 890 aa, synthetic construct
  REGION 1..890: note = Variant of RNA polymerase
MHHHHHHMNTINIAKNDFSDIELAAIPFNTLADHYGERLAREQLALEHESYEMGEARFRKMFERQLKAGEVADNAAAKPLITTLLPKMIARINDWFEEVKAKRGKRPTAFQFLQEIKPEAVAYITIKTTLACLTSADNTTVQAVASAIGRAIEDEARFGRIRDLEAKHFKKNVEEQLNKRVGHVYKKAFMQVVEHDMLSKGLLGGEAWSSWHKEDSIHVGVRCIEMLIESTGMVSLHRQNAGVVGADSETIELAPEYAEAIATRAGALAGISPMFQPCVVPPKPWTGITGGGYWAAGRKPLQLVRTRSLKALRRYEEVSMPEVIKAVNIAQNTAWRINKKVLDVANTITQWKHCPVADIPAMDRGEMPARPLDIDTNEIALKAWKKEASAFYRKDKARMSRRISMEFMLSQANKFANYEAIWFPQNMDWRGRVYAVPMFNPQGNDMTKGLLTFAQEKPIGEDGFYWLKIHGANTAGVDKVPFPQRIKFVEDNHTNIMECAKAPLENTWWAEQDSPFCFLAFCFEYAGVINSGLSYNCSLPLAFDGSCSGLQHFSAMLRDEIGGKAVNLLPSAEYQDIYGIVSDKVNEMLKQDLINGTSTTVETVTDKKTGEITQRTKYGTKVMAGWWLEHGVNRGVTKRPVMTLVYGSKEFGFRDQVLSDTIQPAIDNGKGDMFLNPNQAAGYMAKLIWNAVSGTVVAAVEAMNWLKSAAKLLAAEVKDEKTDTVLRGRCAVHWVTPDGFPVWQEYKKPIQTRLNLMFLGQFRLQPTINTNKDSEIDARKQVSGIAPNFVHSLDGNHLRMTVVWAHEKYGIESFALIHDSFGTIPADAANLFKAVRETFVDTYESCDVLADFYDQIADQLHESQRDKMPALPAKGKLNLRDILKSDFAFA

SEQ ID NO: 1559 - DNA, 2670 bp, synthetic construct
  misc_feature 1..2670: note = Variant of RNA polymerase
  source 1..2670: mol_type = other DNA
atgcaccatcaccatcaccatatgaacacgattaacattgctaagaacgacttctctgacatcgaactggctgctatcccgttcaacactctggctgaccattacggtgagcgtttagctcgcgaacagttggcccttgagcatgagtcttacgagatgggtgaagcacgcttccgcaagatgtttgagcgtcaacttaaagctggtgaggttgcggataacgctgccgccaagcctctcatcactaccctactccctaagatgattgcacgcatcaacgactggtttgaggaagtgaaagctaagcgcggcaagcgcccgacagccttccagttcctgcaagaaatcaagccggaagccgtagcgtacatcaccattaagaccactctggcttgcctaaccagtgcggacaatacaaccgttcaggctgtagcaagcgcaatcggtcgggccattgaggacgaggctcgcttcggtcgtatccgtgaccttgaagctaagcacttcaagaagaacgttgaggaacaactcaacaagcgcgtagggcacgtctacaagaaagcatttatgcaagttgtcgagcacgacatgctctctaagggtctactcggtggcgaggcgtggtcttcgtggcataaggaagactctattcatgtaggagtacgctgcatcgagatgctcattgagtcaaccggaatggttagcttacaccgccaaaatgctggcgtagtgggtgcagactctgagactatcgaactcgcacctgaatacgctgaggctatcgcaacccgtgcaggtgcgctggctggcatctctccgatgttccaaccttgcgtagttcctcctaagccgtggactggcattactggtggtggctattgggctgcggggcgcaaacccctgcagttagtacgtactcgcagtctgaaggcgcttcgccgctatgaagaagtgtcgatgccggaggtcatcaaagcagtcaacattgcgcagaatacagcatggcgtattaacaagaaagttctcgacgtagcgaataccatcacccaatggaagcactgtccagtcgcggatgtgcctgcgatggatcgtggcgaaatgccagctaagccgttggacatcgataccaacgagattgcacttaaagcgtggaagaaagaagcttccgcgttctaccgcaaagacaaagcacgcatgagccgtcgtctgtcgatggagtttatgttatctcaggcgaacaagtttgcgaattatgaggcaatctggtttccgcaaaacatggattggcgtgggcgcgtgtacgctgtcccgatgttcaatcctcagggcaacgatatgacgaaaggcctgctgacctttgcgcaggagaaacccattggtgaagacggcttctattggctcaagattcatggcgcaaatacagctggagtggataaagtaccgtttccacaacgcatcaaatttgttgaggataaccatacgaatattatggaatgcgcgaaagcaccgctggaaaacacttggtgggcggaacaggactcgccgttctgctttctggcgttctgctttgagtatgctggcgtcatcaatagtggtctgtcgtacaactgtagcttgcctctggcatttgatggtagttgctccggcctgcaacatttctcagcgatgttacgcgacgaaattggcggcaaagctgtgaatctcctcccatctgcggaataccaggatatttatggtatcgtcagcgacaaagttaacgagatgctgaaacaagatctgattaacggtacctctaccaccgtggaaacggtgactgataaaaagacaggcgaaattacccaacgcacgaaatacgggaccaaagttatggcagggtggtggttagaacacggtgtgaatcgtggcgtcacgaaacgcccggttatgactttggtgtatgggagcaaagagtttggattccgcgatcaagtgctgagtgacaccattcaaccggcgatcgataacggcaagggtgacatgtttctgaatccgaatcaggctgctggttacatggcgaaactgatctggaacgcagtgtccgggaccgtagtcgcagcagttgaggcgatgaactggctgaaaagtgcggcgaaattacttgctgctgaagtgaaggatgagaagacggatacagttctgcgtggccgctgcgcagtacattgggtgactcccgacggcttccctgtgtggcaggaatacaagaagcctattcaaacgcgcttgaacctgatgttcctcggtcagttccgcttacagcctaccattaacaccaacaaagatagcgagattgatgcacgcaaacaggtgtctggtatcgctcctaactttgtacacagcctggacggtaaccaccttcgtatgactgtagtgtgggcacacgagaagtacggaatcgaatcttttgcactgattcacgactccttcggtaccattccggctgacgctgcgaacctgttcaaagcagtgcgcgaaactttcgttgacacatatgagtcttgtgatgtactggctgatttctacgaccagattgctgaccagttgcacgagtctcaacgcgacaaaatgccagcacttccggctaaaggtaagttgaacctccgtgacatcttaaaatcggacttcgcgttcgcg

SEQ ID NO: 1560 - protein, 890 aa, synthetic construct
  REGION 1..890: note = Variant of RNA polymerase
MHHHHHHMNTINIAKNDFSDIELAAIPFNTLADHYGERLAREQLALEHESYEMGEARFRKMFERQLKAGEVADNAAAKPLITTLLPKMIARINDWFEEVKAKRGKRPTAFQFLQEIKPEAVAYITIKTTLACLTSADNTTVQAVASAIGRAIEDEARFGRIRDLEAKHFKKNVEEQLNKRVGHVYKKAFMQVVEHDMLSKGLLGGEAWSSWHKEDSIHVGVRCIEMLIESTGMVSLHRQNAGVVGADSETIELAPEYAEAIATRAGALAGISPMFQPCVVPPKPWTGITGGGYWAAGRKPLQLVRTRSLKALRRYEEVSMPEVIKAVNIAQNTAWRINKKVLDVANTITQWKHCPVADVPAMDRGEMPAKPLDIDTNEIALKAWKKEASAFYRKDKARMSRRLSMEFMLSQANKFANYEAIWFPQNMDWRGRVYAVPMFNPQGNDMTKGLLTFAQEKPIGEDGFYWLKIHGANTAGVDKVPFPQRIKFVEDNHTNIMECAKAPLENTWWAEQDSPFCFLAFCFEYAGVINSGLSYNCSLPLAFDGSCSGLQHFSAMLRDEIGGKAVNLLPSAEYQDIYGIVSDKVNEMLKQDLINGTSTTVETVTDKKTGEITQRTKYGTKVMAGWWLEHGVNRGVTKRPVMTLVYGSKEFGFRDQVLSDTIQPAIDNGKGDMFLNPNQAAGYMAKLIWNAVSGTVVAAVEAMNWLKSAAKLLAAEVKDEKTDTVLRGRCAVHWVTPDGFPVWQEYKKPIQTRLNLMFLGQFRLQPTINTNKDSEIDARKQVSGIAPNFVHSLDGNHLRMTVVWAHEKYGIESFALIHDSFGTIPADAANLFKAVRETFVDTYESCDVLADFYDQIADQLHESQRDKMPALPAKGKLNLRDILKSDFAFA

SEQ ID NO: 1561 - DNA, 2670 bp, synthetic construct
  misc_feature 1..2670: note = Variant of RNA polymerase
  source 1..2670: mol_type = other DNA
atgcaccatcaccatcaccatatgaacacgattaacattgctaagaacgacttctctgacatcgaactggctgctatcccgttcaacactctggctgaccattacggtgagcgtttagctcgcgaacagttggcccttgagcatgagtcttacgagatgggtgaagcacgcttccgcaagatgtttgagcgtcaacttaaagctggtgaggttgcggataacgctgccgccaagcctctcatcactaccctactccctaagatgattgcacgcatcaacgactggtttgaggaagtgaaagctaagcgcggcaagcgcccgacagccttccagttcctgcaagaaatcaagccggaagccgtagcgtacatcaccattaagaccactctggcttgcctaaccagtgcggacaatacaaccgttcaggctgtagcaagcgcaatcggtcgggccattgaggacgaggctcgcttcggtcgtatccgtgaccttgaagctaagcacttcaagaagaacgttgaggaacaactcaacaagcgcgtagggcacgtctacaagaaagcatttatgcaagttgtcgagcacgacatgctctctaagggtctactcggtggcgaggcgtggtcttcgtggcataaggaagactctattcatgtaggagtacgctgcatcgagatgctcattgagtcaaccggaatggttagcttacaccgccaaaatgctggcgtagtgggtgcagactctgagactatcgaactcgcacctgaatacgctgaggctatcgcaacccgtgcaggtgcgctggctggcatctctccgatgttccaaccttgcgtagttcctcctaagccgtggactggcattactggtggtggctattgggctgcggggcgcaaacccctgcagttagtacgtactcgcagtctggcggcgactcgccgctatgaagaagtgtcgatgccggaggtcatcaaagcagtcaacattgcgcagaatacagcatggcgtattaacaagaaagttctcgacgtagcgaataccatcacccaatggcagcactgtccagtcgcggatgtgcctgcgatggatcgtggcgaaatgccagctcgtccgttggacatcgataccaacgagattgcacttaaagcgtggaagaaagaagcttccgcgttctaccgcaaagacaaagcacgcatgagccgtcgtctgtcgatggagtttatgttatctcaggcgaacaagtttgcgaattatgaggcaatctggtttccgcaaaacatggattggcgtgggcgcgtgtacgctgtcccgatgttcaatcctcagggcaacgatatgacgaaaggcctgctgacctttgcgcaggagaaacccattggtgaagacggcttctattggctcaagattcatggcgcaaatacagctggagtggataaagtaccgtttccacaacgcatcaaatttgttgaggataaccatacgaatattatggaatgcgcgaaagcaccgctggaaaacacttggtgggcggaacaggactcgccgttctgctttctggcgttctgctttgagtatgctggcgtcatcaatagtggtctgtcgtacaactgtagcttgcctctggcatttgatggtagttgctccggcctgcaacatttctcagcgatgttacgcgacgaaattggcggcaaagctgtgaatctcctcccatctgcggaataccaggatatttatcgtatcgtcagcgacaaagttaacgagatgctgaaacaagatctgattaacggtacctctaccaccgtggaaacggtgactgataaaaagacaggcgaaattacccaacgcacgaaatacgggaccaaagttatggcacagtggtggttagaacacggtgtgaatcgtggcgtcacgaaacgcccggttatgactttggtgtatgggagcaaagagtttggattccgcgatcaagtgctgagtgacaccattcaaccggcgatcgataacggcaagggtgacatgtttctgaatccgaatcaggctgctggttacatggcgaaactgatctggaacgcagtgtccgggaccgtagtcgcagcagttgaggcgatgaactggctgaaaagtgcggcgaaattacttgctgctgaagtgaaggatgagaagacggatacagttctgcgtggccgctgcgcagtacattgggtgactcccgacggcttccctgtgtggcaggaatacaagaagcctattcaaacgcgcttgaacctgatgttcctcggtcagttccgcttacagcctaccattaacaccaacaaagatagcgagattgatgcacgcaaacaggtgtctggtatcgctcctaactttgtacacagcctggacggtaaccaccttcgtatgactgtagtgtgggcacacgagaagtacggaatcgaatcttttgcactgattcacgactccttcggtaccattccggctgacgctgcgaacctgttcaaagcagtgcgcgaaactttcgttgacacatatgagtcttgtgatgtactggctgatttctacgaccagattgctgaccagttgcacgagtctcaacgcgacaaaatgccagcacttccggctaaaggtaagttgaacctccgtgacatcttaaaatcggacttcgcgttcgcg

SEQ ID NO: 1562 - protein, 890 aa, synthetic construct
  REGION 1..890: note = Variant of RNA polymerase
MHHHHHHMNTINIAKNDFSDIELAAIPFNTLADHYGERLAREQLALEHESYEMGEARFRKMFERQLKAGEVADNAAAKPLITTLLPKMIARINDWFEEVKAKRGKRPTAFQFLQEIKPEAVAYITIKTTLACLTSADNTTVQAVASAIGRAIEDEARFGRIRDLEAKHFKKNVEEQLNKRVGHVYKKAFMQVVEHDMLSKGLLGGEAWSSWHKEDSIHVGVRCIEMLIESTGMVSLHRQNAGVVGADSETIELAPEYAEAIATRAGALAGISPMFQPCVVPPKPWTGITGGGYWAAGRKPLQLVRTRSLAATRRYEEVSMPEVIKAVNIAQNTAWRINKKVLDVANTITQWQHCPVADVPAMDRGEMPARPLDIDTNEIALKAWKKEASAFYRKDKARMSRRLSMEFMLSQANKFANYEAIWFPQNMDWRGRVYAVPMFNPQGNDMTKGLLTFAQEKPIGEDGFYWLKIHGANTAGVDKVPFPQRIKFVEDNHTNIMECAKAPLENTWWAEQDSPFCFLAFCFEYAGVINSGLSYNCSLPLAFDGSCSGLQHFSAMLRDEIGGKAVNLLPSAEYQDIYRIVSDKVNEMLKQDLINGTSTTVETVTDKKTGEITQRTKYGTKVMAQWWLEHGVNRGVTKRPVMTLVYGSKEFGFRDQVLSDTIQPAIDNGKGDMFLNPNQAAGYMAKLIWNAVSGTVVAAVEAMNWLKSAAKLLAAEVKDEKTDTVLRGRCAVHWVTPDGFPVWQEYKKPIQTRLNLMFLGQFRLQPTINTNKDSEIDARKQVSGIAPNFVHSLDGNHLRMTVVWAHEKYGIESFALIHDSFGTIPADAANLFKAVRETFVDTYESCDVLADFYDQIADQLHESQRDKMPALPAKGKLNLRDILKSDFAFA

SEQ ID NO: 1563 - DNA, 2670 bp, synthetic construct
  misc_feature 1..2670: note = Variant of RNA polymerase
  source 1..2670: mol_type = other DNA
atgcaccatcaccatcaccatatgaacacgattaacattgctaagaacgacttctctgacatcgaactggctgctatcccgttcaacactctggctgaccattacggtgagcgtttagctcgcgaacagttggcccttgagcatgagtcttacgagatgggtgaagcacgcttccgcaagatgtttgagcgtcaacttaaagctggtgaggttgcggataacgctgccgccaagcctctcatcactaccctactccctaagatgattgcacgcatcaacgactggtttgaggaagtgaaagctaagcgcggcaagcgcccgacagccttccagttcctgcaagaaatcaagccggaagccgtagcgtacatcaccattaagaccactctggcttgcctaaccagtgcggacaatacaaccgttcaggctgtagcaagcgcaatcggtcgggccattgaggacgaggctcgcttcggtcgtatccgtgaccttgaagctaagcacttcaagaagaacgttgaggaacaactcaacaagcgcgtagggcacgtctacaagaaagcatttatgcaagttgtcgagcacgacatgctctctaagggtctactcggtggcgaggcgtggtcttcgtggcataaggaagactctattcatgtaggagtacgctgcatcgagatgctcattgagtcaaccggaatggttagcttacaccgccaaaatgctggcgtagtgggtgcagactctgagactatcgaactcgcacctgaatacgctgaggctatcgcaacccgtgcaggtgcgctggctggcatctctccgatgttccaaccttgcgtagttcctcctaagccgtggactggcattactggtggtggctattgggctgcggggcgcaaacccctgcagttagtacgtactcgcagtctgaaggcgcttcgccgctatgaagaagtgtcgatgccggaggtcatcaaagcagtcaacattgcgcagaatacagcatggcgtattaacaagaaagttctcgacgtagcgaataccatcacccaatggaagcactgtccagtcgcggatgtgcctgcgatggatcgtggcgaaatgccagctcgtccgttggacatcgataccaacgagattgcacttaaagcgtggaagaaagaagcttccgcgttctaccgcaaagacaaagcacgcatgagccgtcgtctgtcgatggagtttatgttatctcaggcgaacaagtttgcgaattatgaggcaatctggtttccgcaaaacatggattggcgtgggcgcgtgtacgctgtcccgatgttcaatcctcagggcaacgatatgacgaaaggcctgctgacctttgcgcaggagaaacccattggtgaagacggcttctattggctcaagattcatggcgcaaatacagctggagtggataaagtaccgtttccacaacgcatcaaatttgttgaggataaccatacgaatattatggaatgcgcgaaagcaccgctggaaaacacttggtgggcggaacaggactcgccgttctgctttctggcgttctgctttgagtatgctggcgtcatcaatagtggtctgtcgtacaactgtagcttgcctctggcatttgatggtagttgctccggcctgcaacatttctcagcgatgttacgcgacgaaattggcggcaaagctgtgaatctcctcccatctgcggaataccaggatatttatcgtatcgtcagcgacaaagttaacgagatgctgaaacaagatctgattaacggtacctctaccaccgtggaaacggtgactgataaaaagacaggcgaaattacccaacgcacgaaatacgggaccaaagttatggcagggtggtggttagaacacggtgtgaatcgtggcgtcacgaaacgcccggttatgactttggtgtatgggagcaaagagtttggattccgcgatcaagtgctgagtgacaccattcaaccggcgatcgataacggcaagggtgacatgtttctgaatccgaatcaggctgctggttacatggcgaaactgatctggaacgcagtgtccgggaccgtagtcgcagcagttgaggcgatgaactggctgaaaagtgcggcgaaattacttgctgctgaagtgaaggatgagaagacggatacagttctgcgtggccgctgcgcagtacattgggtgactcccgacggcttccctgtgtggcaggaatacaagaagcctattcaaacgcgcttgaacctgatgttcctcggtcagttccgcttacagcctaccattaacaccaacaaagatagcgagattgatgcacgcaaacaggtgtctggtatcgctcctaactttgtacacagcctggacggtaaccaccttcgtatgactgtagtgtgggcacacgagaagtacggaatcgaatcttttgcactgattcacgactccttcggtaccattccggctgacgctgcgaacctgttcaaagcagtgcgcgaaactttcgttgacacatatgagtcttgtgatgtactggctgatttctacgaccagattgctgaccagttgcacgagtctcaacgcgacaaaatgccagcacttccggctaaaggtaagttgaacctccgtgacatcttaaaatcggacttcgcgttcgcg

SEQ ID NO: 1564 - protein, 890 aa, synthetic construct
  REGION 1..890: note = Variant of RNA polymerase
MHHHHHHMNTINIAKNDFSDIELAAIPFNTLADHYGERLAREQLALEHESYEMGEARFRKMFERQLKAGEVADNAAAKPLITTLLPKMIARINDWFEEVKAKRGKRPTAFQFLQEIKPEAVAYITIKTTLACLTSADNTTVQAVASAIGRAIEDEARFGRIRDLEAKHFKKNVEEQLNKRVGHVYKKAFMQVVEHDMLSKGLLGGEAWSSWHKEDSIHVGVRCIEMLIESTGMVSLHRQNAGVVGADSETIELAPEYAEAIATRAGALAGISPMFQPCVVPPKPWTGITGGGYWAAGRKPLQLVRTRSLKALRRYEEVSMPEVIKAVNIAQNTAWRINKKVLDVANTITQWKHCPVADVPAMDRGEMPARPLDIDTNEIALKAWKKEASAFYRKDKARMSRRLSMEFMLSQANKFANYEAIWFPQNMDWRGRVYAVPMFNPQGNDMTKGLLTFAQEKPIGEDGFYWLKIHGANTAGVDKVPFPQRIKFVEDNHTNIMECAKAPLENTWWAEQDSPFCFLAFCFEYAGVINSGLSYNCSLPLAFDGSCSGLQHFSAMLRDEIGGKAVNLLPSAEYQDIYRIVSDKVNEMLKQDLINGTSTTVETVTDKKTGEITQRTKYGTKVMAGWWLEHGVNRGVTKRPVMTLVYGSKEFGFRDQVLSDTIQPAIDNGKGDMFLNPNQAAGYMAKLIWNAVSGTVVAAVEAMNWLKSAAKLLAAEVKDEKTDTVLRGRCAVHWVTPDGFPVWQEYKKPIQTRLNLMFLGQFRLQPTINTNKDSEIDARKQVSGIAPNFVHSLDGNHLRMTVVWAHEKYGIESFALIHDSFGTIPADAANLFKAVRETFVDTYESCDVLADFYDQIADQLHESQRDKMPALPAKGKLNLRDILKSDFAFA

SEQ ID NO: 1565 - DNA, 2670 bp, synthetic construct
  misc_feature 1..2670: note = Variant of RNA polymerase
  source 1..2670: mol_type = other DNA
atgcaccatcaccatcaccatatgaacacgattaacattgctaagaacgacttctctgacatcgaactggctgctatcccgttcaacactctggctgaccattacggtgagcgtttagctcgcgaacagttggcccttgagcatgagtcttacgagatgggtgaagcacgcttccgcaagatgtttgagcgtcaacttaaagctggtgaggttgcggataacgctgccgccaagcctctcatcactaccctactccctaagatgattgcacgcatcaacgactggtttgaggaagtgaaagctaagcgcggcaagcgcccgacagccttccagttcctgcaagaaatcaagccggaagccgtagcgtacatcaccattaagaccactctggcttgcctaaccagtgcggacaatacaaccgttcaggctgtagcaagcgcaatcggtcgggccattgaggacgaggctcgcttcggtcgtatccgtgaccttgaagctaagcacttcaagaagaacgttgaggaacaactcaacaagcgcgtagggcacgtctacaagaaagcatttatgcaagttgtcgagcacgacatgctctctaagggtctactcggtggcgaggcgtggtcttcgtggcataaggaagactctattcatgtaggagtacgctgcatcgagatgctcattgagtcaaccggaatggttagcttacaccgccaaaatgctggcgtagtgggtgcagactctgagactatcgaactcgcacctgaatacgctgaggctatcgcaacccgtgcaggtgcgctggctggcatctctccgatgttccaaccttgcgtagttcctcctaagccgtggactggcattactggtggtggctattgggctgcggggcgcaaacccctgcagttagtacgtactcgcagtctgaaggcgcttcgccgctatgaagaagtgtcgatgccggaggtcatcaaagcagtcaacattgcgcagaatacagcatggcgtattaacaagaaagttctcgacgtagcgaataccatcacccaatggaagcactgtccagtcgcggatgtgcctgcgatggatcgtggcgaaatgccagctcgtccgttggacatcgataccaacgagattgcacttaaagcgtggaagaaagaagcttccgcgttctaccgcaaagacaaagcacgcatgagccgtcgtctgtcgatggagtttatgttatctcaggcgaacaagtttgcgaattatgaggcaatctggtttccgcaaaacatggattggcgtgggcgcgtgtacgctgtcccgatgttcaatcctcagggcaacgatatgacgaaaggcctgctgacctttgcgcaggagaaacccattggtgaagacggcttctattggctcaagattcatggcgcaaatacagctggagtggataaagtaccgtttccacaacgcatcaaatttgttgaggataaccatacgaatattatggaatgcgcgaaagcaccgctggaaaacacttggtgggcggaacaggactcgccgttctgctttctggcgttctgctttgagtatgctggcgtcatcaatagtggtctgtcgtacaactgtagcttgcctctggcatttgatggtagttgctccggcctgcaacatttctcagcgatgttacgcgacgaaattggcggcaaagctgtgaatctcctcccatctgcggaataccaggatatttatcgtatcgtcagcgacaaagttaacgagatgctgaaacaagatctgattaacggtacctctaccaccgtggaaacggtgactgataaaaagacaggcgaaattacccaacgcacgaaatacgggaccaaagttatggcagggtggtggttagaacacggtgtgaatcgtggcgtcacgaaacgcccggttatgactttggtgtatgggagcaaagagtttggattccgcgatcaagtgctgagtgacaccattcaaccggcgatcgataacggcaagggtgacatgtttctgaatccgaatcaggctgctggttacatggcgaaactgatctggaacgcagtgtccgggaccgtagtcgcagcagttgaggcgatgaactggctgaaaagtgcggcgaaattacttgctgctgaagtgaaggatgagaagacggatacaattctgcgtggccgctgcgcagtacattgggtgactcccgacggcttccctgtgtggcaggaatacaagaagcctattcaaacgcgcttgaacctgatgttcctcggtcagttccgcttacagcctaccattaacaccaacaaagatagcgagattgatgcacgcaaacaggtgtctggtatcgctcctaactttgtacacagcctggacggtaaccaccttcgtatgactgtagtgtgggcacacgagaagtacggaatcgaatcttttgcactgattcacgactccttcggtaccattccggctgacgctgcgaacctgttcaaagcagtgcgcgaaactttcgttgacacatatgagtcttgtgatgtactggctgatttctacgaccagattgctgaccagttgcacgagtctcaacgcgacaaaatgccagcacttccggctaaaggtaagttgaacctccgtgacatcttaaaatcggacttcgcgttcgcg

SEQ ID NO: 1566 - protein, 890 aa, synthetic construct
  REGION 1..890: note = Variant of RNA polymerase
MHHHHHHMNTINIAKNDFSDIELAAIPFNTLADHYGERLAREQLALEHESYEMGEARFRKMFERQLKAGEVADNAAAKPLITTLLPKMIARINDWFEEVKAKRGKRPTAFQFLQEIKPEAVAYITIKTTLACLTSADNTTVQAVASAIGRAIEDEARFGRIRDLEAKHFKKNVEEQLNKRVGHVYKKAFMQVVEHDMLSKGLLGGEAWSSWHKEDSIHVGVRCIEMLIESTGMVSLHRQNAGVVGADSETIELAPEYAEAIATRAGALAGISPMFQPCVVPPKPWTGITGGGYWAAGRKPLQLVRTRSLKALRRYEEVSMPEVIKAVNIAQNTAWRINKKVLDVANTITQWKHCPVADVPAMDRGEMPARPLDIDTNEIALKAWKKEASAFYRKDKARMSRRLSMEFMLSQANKFANYEAIWFPQNMDWRGRVYAVPMFNPQGNDMTKGLLTFAQEKPIGEDGFYWLKIHGANTAGVDKVPFPQRIKFVEDNHTNIMECAKAPLENTWWAEQDSPFCFLAFCFEYAGVINSGLSYNCSLPLAFDGSCSGLQHFSAMLRDEIGGKAVNLLPSAEYQDIYRIVSDKVNEMLKQDLINGTSTTVETVTDKKTGEITQRTKYGTKVMAGWWLEHGVNRGVTKRPVMTLVYGSKEFGFRDQVLSDTIQPAIDNGKGDMFLNPNQAAGYMAKLIWNAVSGTVVAAVEAMNWLKSAAKLLAAEVKDEKTDTILRGRCAVHWVTPDGFPVWQEYKKPIQTRLNLMFLGQFRLQPTINTNKDSEIDARKQVSGIAPNFVHSLDGNHLRMTVVWAHEKYGIESFALIHDSFGTIPADAANLFKAVRETFVDTYESCDVLADFYDQIADQLHESQRDKMPALPAKGKLNLRDILKSDFAFA

SEQ ID NO: 1567 - DNA, 2670 bp, synthetic construct
  misc_feature 1..2670: note = Variant of RNA polymerase
  source 1..2670: mol_type = other DNA
atgcaccatcaccatcaccatatgaacacgattaacattgctaagaacgacttctctgacatcgaactggctgctatcccgttcaacactctggctgaccattacggtgagcgtttagctcgcgaacagttggcccttgagcatgagtcttacgagatgggtgaagcacgcttccgcaagatgtttgagcgtcaacttaaagctggtgaggttgcggataacgctgccgccaagcctctcatcactaccctactccctaagatgattgcacgcatcaacgactggtttgaggaagtgaaagctaagcgcggcaagcgcccgacagccttccagttcctgcaagaaatcaagccggaagccgtagcgtacatcaccattaagaccactctggcttgcctaaccagtgcggacaatacaaccgttcaggctgtagcaagcgcaatcggtcgggccattgaggacgaggctcgcttcggtcgtatccgtgaccttgaagctaagcacttcaagaagaacgttgaggaacaactcaacaagcgcgtagggcacgtctacaagaaagcatttatgcaagttgtcgagcacgacatgctctctaagggtctactcggtggcgaggcgtggtcttcgtggcataaggaagactctattcatgtaggagtacgctgcatcgagatgctcattgagtcaaccggaatggttagcttacaccgccaaaatgctggcgtagtgggtgcagactctgagactatcgaactcgcacctgaatacgctgaggctatcgcaacccgtgcaggtgcgctggctggcatctctccgatgttccaaccttgcgtagttcctcctaagccgtggactggcattactggtggtggctattgggctgcggggcgcaaacccctgcagttagtacgtactcgcagtctgaaggcgcttcgccgctatgaagaagtgtcgatgccggaggtcatcaaagcagtcaacattgcgcagaatacagcatggcgtattaacaagaaagttctcgacgtagcgaataccatcacccaatggcagcactgtccagtccgtgatgttcctgcgatggatcgtggcgaaatgccagctcgtccgttggacatcgataccaacgagattgcacttaaagcgtggaagaaagaagcttccgcgttctaccgccgcgacaaagcacgcatgagccgtcgtctgtcgatggagtttatgttatctcaggcgaacaagtttgcgaattatgaggcaatctggtttccgcaaaacatggattggcgtgggcgcgtgtacgctgtcccgatgttcaatcctcagggcaacgatatgacgaaaggcctgctgacctttgcgcaggagaaacccattggtgaagacggcttctattggctcaagattcatggcgcaaatacagctggagtggataaagtaccgtttccacaacgcatcaaatttgttgaggataaccatacgaatattatggaatgcgcgaaagcaccgctggaaaacacttggtgggcggaacaggactcgccgttctgctttctggcgttctgctttgagtatgctggcgtcatcaatagtggtctgtcgtacaactgtagcttgcctctggcatttgatggtagttgctccggcctgcaacatttctcagcgatgttacgcgacgaaattggcggcaaagctgtgaatctcctcccatctgcggaataccaggatatttatcgtatcgtcagcgacaaagttaacgagatgctgaaacaagatctgattaacggtacctctaccaccgtggaaacggtgactgataaaaagacaggcgaaattacccaacgcacgaaatacgggaccaaagttatggcacagtggtggttagaacacggtgtgaatcgtggcgtcacgaaacgcccggttatgactttggtgtatgggagcaaagagtttggattccgcgatcaagtgctgagtgacaccattcaaccggcgatcgataacggcaagggtgacatgtttctgaatccgaatcaggctgctggttacatggcgaaactgatctggaacgcagtgtccgggaccgtagtcgcagcagttgaggcgatgaactggctgaaaagtgcggcgaaattacttgctgctgaagtgaaggatgagaagacggatacagttctgcgtggccgctgcgcagtacattgggtgactcccgacggcttccctgtgtggcaggaatacaagaagcctattcaaacgcgcttgaacctgatgttcctcggtcagttccgcttacagcctaccattaacaccaacaaagatagcgagattgatgcacgcaaacaggtgtctggtatcgctcctaactttgtacacagcctggacggtaaccaccttcgtatgactgtagtgtgggcacacgagaagtacggaatcgaatcttttgcactgattcacgactccttcggtaccattccggctgacgctgcgaacctgttcaaagcagtgcgcgaaactttcgttgacacatatgagtcttgtgatgtactggctgatttctacgaccagattgctgaccagttgcacgagtctcaacgcgacaaaatgccagcacttccggctaaaggtaagttgaacctccgtgacatcttaaaatcggacttcgcgttcgcg

SEQ ID NO: 1568 - protein, 890 aa, synthetic construct
  REGION 1..890: note = Variant of RNA polymerase
MHHHHHHMNTINIAKNDFSDIELAAIPFNTLADHYGERLAREQLALEHESYEMGEARFRKMFERQLKAGEVADNAAAKPLITTLLPKMIARINDWFEEVKAKRGKRPTAFQFLQEIKPEAVAYITIKTTLACLTSADNTTVQAVASAIGRAIEDEARFGRIRDLEAKHFKKNVEEQLNKRVGHVYKKAFMQVVEHDMLSKGLLGGEAWSSWHKEDSIHVGVRCIEMLIESTGMVSLHRQNAGVVGADSETIELAPEYAEAIATRAGALAGISPMFQPCVVPPKPWTGITGGGYWAAGRKPLQLVRTRSLKALRRYEEVSMPEVIKAVNIAQNTAWRINKKVLDVANTITQWQHCPVRDVPAMDRGEMPARPLDIDTNEIALKAWKKEASAFYRRDKARMSRRLSMEFMLSQANKFANYEAIWFPQNMDWRGRVYAVPMFNPQGNDMTKGLLTFAQEKPIGEDGFYWLKIHGANTAGVDKVPFPQRIKFVEDNHTNIMECAKAPLENTWWAEQDSPFCFLAFCFEYAGVINSGLSYNCSLPLAFDGSCSGLQHFSAMLRDEIGGKAVNLLPSAEYQDIYRIVSDKVNEMLKQDLINGTSTTVETVTDKKTGEITQRTKYGTKVMAQWWLEHGVNRGVTKRPVMTLVYGSKEFGFRDQVLSDTIQPAIDNGKGDMFLNPNQAAGYMAKLIWNAVSGTVVAAVEAMNWLKSAAKLLAAEVKDEKTDTVLRGRCAVHWVTPDGFPVWQEYKKPIQTRLNLMFLGQFRLQPTINTNKDSEIDARKQVSGIAPNFVHSLDGNHLRMTVVWAHEKYGIESFALIHDSFGTIPADAANLFKAVRETFVDTYESCDVLADFYDQIADQLHESQRDKMPALPAKGKLNLRDILKSDFAFA

SEQ ID NO: 1569 - DNA, 2670 bp, synthetic construct
  misc_feature 1..2670: note = Variant of RNA polymerase
  source 1..2670: mol_type = other DNA
atgcaccatcaccatcaccatatgaacacgattaacattgctaagaacgacttctctgacatcgaactggctgctatcccgttcaacactctggctgaccattacggtgagcgtttagctcgcgaacagttggcccttgagcatgagtcttacgagatgggtgaagcacgcttccgcaagatgtttgagcgtcaacttaaagctggtgaggttgcggataacgctgccgccaagcctctcatcactaccctactccctaagatgattgcacgcatcaacgactggtttgaggaagtgaaagctaagcgcggcaagcgcccgacagccttccagttcctgcaagaaatcaagccggaagccgtagcgtacatcaccattaagaccactctggcttgcctaaccagtgcggacaatacaaccgttcaggctgtagcaagcgcaatcggtcgggccattgaggacgaggctcgcttcggtcgtatccgtgaccttgaagctaagcacttcaagaagaacgttgaggaacaactcaacaagcgcgtagggcacgtctacaagaaagcatttatgcaagttgtcgagcacgacatgctctctaagggtctactcggtggcgaggcgtggtcttcgtggcataaggaagactctattcatgtaggagtacgctgcatcgagatgctcattgagtcaaccggaatggttagcttacaccgccaaaatgctggcgtagtgggtgcagactctgagactatcgaactcgcacctgaatacgctgaggctatcgcaacccgtgcaggtgcgctggctggcatctctccgatgttccaaccttgcgtagttcctcctaagccgtggactggcattactggtggtggctattgggctgcggggcgcaaacccctgcagttagtacgtactcgcagtctgaaggcgcttcgccgctatgaagaagtgtcgatgccggaggtcatcaaagcagtcaacattgcgcagaatacagcatggcgtattaacaagaaagttctcgacgtagcgaataccatcacccaatggaagcactgtccagtcgcggatgtgcctgcgatggatcgtggcgaaatgccagctcgtccgttggacatcgataccaacgagattgcacttaaagcgtggaagaaagaagcttccgcgttctaccgcaaagacaaagcacgcatgagccgtcgtctgtcgatggagtttatgttatctcaggcgaacaagtttgcgaattatgaggcaatctggtttccgcaaaacatggattggcgtgggcgcgtgtacgctgtcccgatgttcaatcctcagggcaacgatatgacgaaaggcctgctgacctttgcgcaggagaaacccattggtgaagacggcttctattggctcaagattcatggcgcaaatacagctggagtggataaagtaccgtttccacaacgcatcaaatttgttgaggataaccatacgaatattatggaatgcgcgaaagcaccgctggaaaacacttggtgggcggaacaggactcgccgttctgctttctggcgttctgctttgagtatgctggcgtcatcaatagtggtctgtcgtacaactgtagcttgcctctggcatttgatggtagttgctccggcctgcaacatttctcagcgatgttacgcgacgaaattggcggcaaagctgtgaatctcctcccatctgcggaataccaggatatttatcgtatcgtcagcgacaaagttaacgagatgctgaaacaagatctgattaacggtacctctaccaccgtggaaacggtgactgataaaaagacaggcgaaattacccaacgcacgaaatacgggaccaaagttatggcacagtggtggttagaacacggtgtgaatcgtggcgtcacgaaacgcccggttatgactttggtgtatgggagcaaagagtttggattccgcgatcaagtgctgagtgacaccattcaaccggcgatcgataacggcaagggtgacatgtttctgaatccgaatcaggctgctggttacatggcgaaactgatctggaacgcagtgtccgggaccgtagtcgcagcagttgaggcgatgaactggctgaaaagtgcggcgaaattacttgctgctgaagtgaaggatgagaagacggatacagttctgcgtggccgctgcgcagtacattgggtgactcccgacggcttccctgtgtggcaggaatacaagaagcctattcaaacgcgcttgaacctgatgttcctcggtcagttccgcttacagcctaccattaacaccaacaaagatagcgagattgatgcacgcaaacaggtgtctggtatcgctcctaactttgtacacagcctggacggtaaccaccttcgtatgactgtagtgtgggcacacgagaagtacggaatcgaatcttttgcactgattcacgactccttcggtaccattccggctgacgctgcgaacctgttcaaagcagtgcgcgaaactttcgttgacacatatgagtcttgtgatgtactggctgatttctacgaccagattgctgaccagttgcacgagtctcaacgcgacaaaatgccagcacttccggctaaaggtaagttgaacctccgtgacatcttaaaatcggacttcgcgttcgcg

SEQ ID NO: 1570 - protein, 890 aa, synthetic construct
  REGION 1..890: note = Variant of RNA polymerase
MHHHHHHMNTINIAKNDFSDIELAAIPFNTLADHYGERLAREQLALEHESYEMGEARFRKMFERQLKAGEVADNAAAKPLITTLLPKMIARINDWFEEVKAKRGKRPTAFQFLQEIKPEAVAYITIKTTLACLTSADNTTVQAVASAIGRAIEDEARFGRIRDLEAKHFKKNVEEQLNKRVGHVYKKAFMQVVEHDMLSKGLLGGEAWSSWHKEDSIHVGVRCIEMLIESTGMVSLHRQNAGVVGADSETIELAPEYAEAIATRAGALAGISPMFQPCVVPPKPWTGITGGGYWAAGRKPLQLVRTRSLKALRRYEEVSMPEVIKAVNIAQNTAWRINKKVLDVANTITQWKHCPVADVPAMDRGEMPARPLDIDTNEIALKAWKKEASAFYRKDKARMSRRLSMEFMLSQANKFANYEAIWFPQNMDWRGRVYAVPMFNPQGNDMTKGLLTFAQEKPIGEDGFYWLKIHGANTAGVDKVPFPQRIKFVEDNHTNIMECAKAPLENTWWAEQDSPFCFLAFCFEYAGVINSGLSYNCSLPLAFDGSCSGLQHFSAMLRDEIGGKAVNLLPSAEYQDIYRIVSDKVNEMLKQDLINGTSTTVETVTDKKTGEITQRTKYGTKVMAQWWLEHGVNRGVTKRPVMTLVYGSKEFGFRDQVLSDTIQPAIDNGKGDMFLNPNQAAGYMAKLIWNAVSGTVVAAVEAMNWLKSAAKLLAAEVKDEKTDTVLRGRCAVHWVTPDGFPVWQEYKKPIQTRLNLMFLGQFRLQPTINTNKDSEIDARKQVSGIAPNFVHSLDGNHLRMTVVWAHEKYGIESFALIHDSFGTIPADAANLFKAVRETFVDTYESCDVLADFYDQIADQLHESQRDKMPALPAKGKLNLRDILKSDFAFA

SEQ ID NO: 1571 - DNA, 2670 bp, synthetic construct
  misc_feature 1..2670: note = Variant of RNA polymerase
  source 1..2670: mol_type = other DNA
atgcaccatcaccatcaccatatgaacacgattaacattgctaagaacgacttctctgacatcgaactggctgctatcccgttcaacactctggctgaccattacggtgagcgtttagctcgcgaacagttggcccttgagcatgagtcttacgagatgggtgaagcacgcttccgcaagatgtttgagcgtcaacttaaagctggtgaggttgcggataacgctgccgccaagcctctcatcactaccctactccctaagatgattgcacgcatcaacgactggtttgaggaagtgaaagctaagcgcggcaagcgcccgacagccttccagttcctgcaagaaatcaagccggaagccgtagcgtacatcaccattaagaccactctggcttgcctaaccagtgcggacaatacaaccgttcaggctgtagcaagcgcaatcggtcgggccattgaggacgaggctcgcttcggtcgtatccgtgaccttgaagctaagcacttcaagaagaacgttgaggaacaactcaacaagcgcgtagggcacgtctacaagaaagcatttatgcaagttgtcgagcacgacatgctctctaagggtctactcggtggcgaggcgtggtcttcgtggcataaggaagactctattcatgtaggagtacgctgcatcgagatgctcattgagtcaaccggaatggttagcttacaccgccaaaatgctggcgtagtgggtgcagactctgagactatcgaactcgcacctgaatacgctgaggctatcgcaacccgtgcaggtgcgctggctggcatctctccgatgttccaaccttgcgtagttcctcctaagccgtggactggcattactggtggtggctattgggctgcggggcgcaaacccctgcagttagtacgtactcgcagtctggcggcgcttcgccgctatgaagaagtgtcgatgccggaggtcatcaaagcagtcaacattgcgcagaatacagcatggcgtattaacaagaaagttctcgacgtagcgaataccatcacccaatggcagcactgtccagtcgcggatgtgcctgcgatggatcgtggcgaaatgccagctcgtccgttggacatcgataccaacgagattgcacttaaagcgtggaagaaagaagcttccgcgttctaccgcaaagacaaagcacgcatgagccgtcgtctgtcgatggagtttatgttatctcaggcgaacaagtttgcgaattatgaggcaatctggtttccgcaaaacatggattggcgtgggcgcgtgtacgctgtcccgatgttcaatcctcagggcaacgatatgacgaaaggcctgctgacctttgcgcaggagaaacccattggtgaagacggcttctattggctcaagattcatggcgcaaatacagctggagtggataaagtaccgtttccacaacgcatcaaatttgttgaggataaccatacgaatattatggaatgcgcgaaagcaccgctggaaaacacttggtgggcggaacaggactcgccgttctgctttctggcgttctgctttgagtatgctggcgtcatcaatagtggtctgtcgtacaactgtagcttgcctctggcatttgatggtagttgctccggcctgcaacatttctcagcgatgttacgcgacgaaattggcggcaaagctgtgaatctcctcccatctgcggaataccaggatatttatcgtatcgtcagcgacaaagttaacgagatgctgaaacaagatctgattaacggtacctctaccaccgtggaaacggtgactgataaaaagacaggcgaaattacccaacgcacgaaatacgggaccaaagttatggcacagtggtggttagaacacggtgtgaatcgtggcgtcacgaaacgcccggttatgactttggtgtatgggagcaaagagtttggattccgcgatcaagtgctgagtgacaccattcaaccggcgatcgataacggcaagggtgacatgtttctgaatccgaatcaggctgctggttacatggcgaaactgatctggaacgcagtgtccgggaccgtagtcgcagcagttgaggcgatgaactggctgaaaagtgcggcgaaattacttgctgctgaagtgaaggatgagaagacggatacaattctgcgtggccgctgcgcagtacattgggtgactcccgacggcttccctgtgtggcaggaatacaagaagcctattcaaacgcgcttgaacctgatgttcctcggtcagttccgcttacagcctaccattaacaccaacaaagatagcgagattgatgcacgcaaacaggtgtctggtatcgctcctaactttgtacacagcctggacggtaaccaccttcgtatgactgtagtgtgggcacacgagaagtacggaatcgaatcttttgcactgattcacgactccttcggtaccattccggctgacgctgcgaacctgttcaaagcagtgcgcgaaactttcgttgacacatatgagtcttgtgatgtactggctgatttctacgaccagattgctgaccagttgcacgagtctcaacgcgacaaaatgccagcacttccggctaaaggtaagttgaacctccgtgacatcttaaaatcggacttcgcgttcgcg

SEQ ID NO: 1572 - protein, 890 aa, synthetic construct
  REGION 1..890: note = Variant of RNA polymerase
MHHHHHHMNTINIAKNDFSDIELAAIPFNTLADHYGERLAREQLALEHESYEMGEARFRKMFERQLKAGEVADNAAAKPLITTLLPKMIARINDWFEEVKAKRGKRPTAFQFLQEIKPEAVAYITIKTTLACLTSADNTTVQAVASAIGRAIEDEARFGRIRDLEAKHFKKNVEEQLNKRVGHVYKKAFMQVVEHDMLSKGLLGGEAWSSWHKEDSIHVGVRCIEMLIESTGMVSLHRQNAGVVGADSETIELAPEYAEAIATRAGALAGISPMFQPCVVPPKPWTGITGGGYWAAGRKPLQLVRTRSLAALRRYEEVSMPEVIKAVNIAQNTAWRINKKVLDVANTITQWQHCPVADVPAMDRGEMPARPLDIDTNEIALKAWKKEASAFYRKDKARMSRRLSMEFMLSQANKFANYEAIWFPQNMDWRGRVYAVPMFNPQGNDMTKGLLTFAQEKPIGEDGFYWLKIHGANTAGVDKVPFPQRIKFVEDNHTNIMECAKAPLENTWWAEQDSPFCFLAFCFEYAGVINSGLSYNCSLPLAFDGSCSGLQHFSAMLRDEIGGKAVNLLPSAEYQDIYRIVSDKVNEMLKQDLINGTSTTVETVTDKKTGEITQRTKYGTKVMAQWWLEHGVNRGVTKRPVMTLVYGSKEFGFRDQVLSDTIQPAIDNGKGDMFLNPNQAAGYMAKLIWNAVSGTVVAAVEAMNWLKSAAKLLAAEVKDEKTDTILRGRCAVHWVTPDGFPVWQEYKKPIQTRLNLMFLGQFRLQPTINTNKDSEIDARKQVSGIAPNFVHSLDGNHLRMTVVWAHEKYGIESFALIHDSFGTIPADAANLFKAVRETFVDTYESCDVLADFYDQIADQLHESQRDKMPALPAKGKLNLRDILKSDFAFA

SEQ ID NO: 1573 - DNA, 2670 bp, synthetic construct
  misc_feature 1..2670: note = Variant of RNA polymerase
  source 1..2670: mol_type = other DNA
atgcaccatcaccatcaccatatgaacacgattaacattgctaagaacgacttctctgacatcgaactggctgctatcccgttcaacactctggctgaccattacggtgagcgtttagctcgcgaacagttggcccttgagcatgagtcttacgagatgggtgaagcacgcttccgcaagatgtttgagcgtcaacttaaagctggtgaggttgcggataacgctgccgccaagcctctcatcactaccctactccctaagatgattgcacgcatcaacgactggtttgaggaagtgaaagctaagcgcggcaagcgcccgacagccttccagttcctgcaagaaatcaagccggaagccgtagcgtacatcaccattaagaccactctggcttgcctaaccagtgcggacaatacaaccgttcaggctgtagcaagcgcaatcggtcgggccattgaggacgaggctcgcttcggtcgtatccgtgaccttgaagctaagcacttcaagaagaacgttgaggaacaactcaacaagcgcgtagggcacgtctacaagaaagcatttatgcaagttgtcgagcacgacatgctctctaagggtctactcggtggcgaggcgtggtcttcgtggcataaggaagactctattcatgtaggagtacgctgcatcgagatgctcattgagtcaaccggaatggttagcttacaccgccaaaatgctggcgtagtgggtgcagactctgagactatcgaactcgcacctgaatacgctgaggctatcgcaacccgtgcaggtgcgctggctggcatctctccgatgttccaaccttgcgtagttcctcctaagccgtggactggcattactggtggtggctattgggctgcggggcgcaaacccctgcagttagtacgtactcgcagtctggcggcgcttcgccgctatgaagaagtgtcgatgccggaggtcatcaaagcagtcaacattgcgcagaatacagcatggcgtattaacaagaaagttctcgacgtagcgaataccatcacccaatggaagcactgtccagtcgccgatattcctgcgatggatcgtggcgaaatgccagctcgtccgttggacatcgataccaacgagattgcacttaaagcgtggaagaaagaagcttccgcgttctaccgcaaagacaaagcacgcatgagccgtcgtctgtcgatggagtttatgttatctcaggcgaacaagtttgcgaattatgaggcaatctggtttccgcaaaacatggattggcgtgggcgcgtgtacgctgtcccgatgttcaatcctcagggcaacgatatgacgaaaggcctgctgacctttgcgcaggagaaacccattggtgaagacggcttctattggctcaagattcatggcgcaaatacagctggagtggataaagtaccgtttccacaacgcatcaaatttgttgaggataaccatacgaatattatggaatgcgcgaaagcaccgctggaaaacacttggtgggcggaacaggactcgccgttctgctttctggcgttctgctttgagtatgctggcgtcatcaatagtggtctgtcgtacaactgtagcttgcctctggcatttgatggtagttgctccggcctgcaacatttctcagcgatgttacgcgacgaaattggcggcaaagctgtgaatctcctcccatctgcggaataccaggatatttatcgtatcgtcagcgacaaagttaacgagatgctgaaacaagatctgattaacggtacctctaccaccgtggaaacggtgactgataaaaagacaggcgaaattacccaacgcacgaaatacgggaccaaagttatggcacagtggtggttagaacacggtgtgaatcgtggcgtcacgaaacgcccggttatgactttggtgtatgggagcaaagagtttggattccgcgatcaagtgctgagtgacaccattcaaccggcgatcgataacggcaagggtgacatgtttctgaatccgaatcaggctgctggttacatggcgaaactgatctggaacgcagtgtccgggaccgtagtcgcagcagttgaggcgatgaactggctgaaaagtgcggcgaaattacttgctgctgaagtgaaggatgagaagacggatacagttctgcgtggccgctgcgcagtacattgggtgactcccgacggcttccctgtgtggcaggaatacaagaagcctattcaaacgcgcttgaacctgatgttcctcggtcagttccgcttacagcctaccattaacaccaacaaagatagcgagattgatgcacgcaaacaggtgtctggtatcgctcctaactttgtacacagcctggacggtaaccaccttcgtatgactgtagtgtgggcacacgagaagtacggaatcgaatcttttgcactgattcacgactccttcggtaccattccggctgacgctgcgaacctgttcaaagcagtgcgcgaaactttcgttgacacatatgagtcttgtgatgtactggctgatttctacgaccagattgctgaccagttgcacgagtctcaacgcgacaaaatgccagcacttccggctaaaggtaagttgaacctccgtgacatcttaaaatcggacttcgcgttcgcg

SEQ ID NO: 1574 - protein, 890 aa, synthetic construct
  REGION 1..890: note = Variant of RNA polymerase
MHHHHHHMNTINIAKNDFSDIELAAIPFNTLADHYGERLAREQLALEHESYEMGEARFRKMFERQLKAGEVADNAAAKPLITTLLPKMIARINDWFEEVKAKRGKRPTAFQFLQEIKPEAVAYITIKTTLACLTSADNTTVQAVASAIGRAIEDEARFGRIRDLEAKHFKKNVEEQLNKRVGHVYKKAFMQVVEHDMLSKGLLGGEAWSSWHKEDSIHVGVRCIEMLIESTGMVSLHRQNAGVVGADSETIELAPEYAEAIATRAGALAGISPMFQPCVVPPKPWTGITGGGYWAAGRKPLQLVRTRSLAALRRYEEVSMPEVIKAVNIAQNTAWRINKKVLDVANTITQWKHCPVADIPAMDRGEMPARPLDIDTNEIALKAWKKEASAFYRKDKARMSRRLSMEFMLSQANKFANYEAIWFPQNMDWRGRVYAVPMFNPQGNDMTKGLLTFAQEKPIGEDGFYWLKIHGANTAGVDKVPFPQRIKFVEDNHTNIMECAKAPLENTWWAEQDSPFCFLAFCFEYAGVINSGLSYNCSLPLAFDGSCSGLQHFSAMLRDEIGGKAVNLLPSAEYQDIYRIVSDKVNEMLKQDLINGTSTTVETVTDKKTGEITQRTKYGTKVMAQWWLEHGVNRGVTKRPVMTLVYGSKEFGFRDQVLSDTIQPAIDNGKGDMFLNPNQAAGYMAKLIWNAVSGTVVAAVEAMNWLKSAAKLLAAEVKDEKTDTVLRGRCAVHWVTPDGFPVWQEYKKPIQTRLNLMFLGQFRLQPTINTNKDSEIDARKQVSGIAPNFVHSLDGNHLRMTVVWAHEKYGIESFALIHDSFGTIPADAANLFKAVRETFVDTYESCDVLADFYDQIADQLHESQRDKMPALPAKGKLNLRDILKSDFAFA

SEQ ID NO: 1575 - DNA, 2670 bp, synthetic construct
  misc_feature 1..2670: note = Variant of RNA polymerase
  source 1..2670: mol_type = other DNA
atgcaccatcaccatcaccatatgaacacgattaacattgctaagaacgacttctctgacatcgaactggctgctatcccgttcaacactctggctgaccattacggtgagcgtttagctcgcgaacagttggcccttgagcatgagtcttacgagatgggtgaagcacgcttccgcaagatgtttgagcgtcaacttaaagctggtgaggttgcggataacgctgccgccaagcctctcatcactaccctactccctaagatgattgcacgcatcaacgactggtttgaggaagtgaaagctaagcgcggcaagcgcccgacagccttccagttcctgcaagaaatcaagccggaagccgtagcgtacatcaccattaagaccactctggcttgcctaaccagtgcggacaatacaaccgttcaggctgtagcaagcgcaatcggtcgggccattgaggacgaggctcgcttcggtcgtatccgtgaccttgaagctaagcacttcaagaagaacgttgaggaacaactcaacaagcgcgtagggcacgtctacaagaaagcatttatgcaagttgtcgagcacgacatgctctctaagggtctactcggtggcgaggcgtggtcttcgtggcataaggaagactctattcatgtaggagtacgctgcatcgagatgctcattgagtcaaccggaatggttagcttacaccgccaaaatgctggcgtagtgggtgcagactctgagactatcgaactcgcacctgaatacgctgaggctatcgcaacccgtgcaggtgcgctggctggcatctctccgatgttccaaccttgcgtagttcctcctaagccgtggactggcattactggtggtggctattgggctgcggggcgcaaacccctgcagttagtacgtactcgcagtctggcggcgcttcgccgctatgaagaagtgtcgatgccggaggtcatcaaagcagtcaacattgcgcagaatacagcatggcgtattaacaagaaagttctcgacgtagcgaataccatcacccaatggcagcactgtccagtcgcggatgtgcctgcgatggatcgtggcgaaatgccagctcgtccgttggacatcgataccaacgagattgcacttaaagcgtggaagaaagaagcttccgcgttctaccgcaaagacaaagcacgcatgagccgtcgtctgtcgatggagtttatgttatctcaggcgaacaagtttgcgaattatgaggcaatctggtttccgcaaaacatggattggcgtgggcgcgtgtacgctgtcccgatgttcaatcctcagggcaacgatatgacgaaaggcctgctgacctttgcgcaggagaaacccattggtgaagacggcttctattggctcaagattcatggcgcaaatacagctggagtggataaagtaccgtttccacaacgcatcaaatttgttgaggataaccatacgaatattatggaatgcgcgaaagcaccgctggaaaacacttggtgggcggaacaggactcgccgttctgctttctggcgttctgctttgagtatgctggcgtcatcaatagtggtctgtcgtacaactgtagcttgcctctggcatttgatggtagttgctccggcctgcaacatttctcagcgatgttacgcgacgaaattggcggcaaagctgtgaatctcctcccatctgcggaataccaggatatttatcgtatcgtcagcgacaaagttaacgagatgctgaaacaagatctgattaacggtacctctaccaccgtggaaacggtgactgataaaaagacaggcgaaattacccaacgcacgaaatacgggaccaaagttatggcacagtggtggttagaacacggtgtgaatcgtggcgtcacgaaacgcccggttatgactttggtgtatgggagcaaagagtttggattccgcgatcaagtgaagagtgacaccattcaaccggcgatcgataacggcaagggtgacatgtttctgaatccgaatcaggctgctggttacatggcgaaactgatctggaacgcagtgtccgggaccgtagtcgcagcagttgaggcgatgaactggctgaaaagtgcggcgaaattacttgctgctgaagtgaaggatgagaagacggatacagttctgcgtggccgctgcgcagtacattgggtgactcccgacggcttccctgtgtggcaggaatacaagaagcctattcaaacgcgcttgaacctgatgttcctcggtcagttccgcttacagcctaccattaacaccaacaaagatagcgagattgatgcacgcaaacaggtgtctggtatcgctcctaactttgtacacagcctggacggtaaccaccttcgtatgactgtagtgtgggcacacgagaagtacggaatcgaatcttttgcactgattcacgactccttcggtaccattccggctgacgctgcgaacctgttcaaagcagtgcgcgaaactttcgttgacacatatgagtcttgtgatgtactggctgatttctacgaccagattgctgaccagttgcacgagtctcaacgcgacaaaatgccagcacttccggctaaaggtaagttgaacctccgtgacatcttaaaatcggacttcgcgttcgcg

SEQ ID NO: 1576 - protein, 890 aa, synthetic construct
  REGION 1..890: note = Variant of RNA polymerase
MHHHHHHMNTINIAKNDFSDIELAAIPFNTLADHYGERLAREQLALEHESYEMGEARFRKMFERQLKAGEVADNAAAKPLITTLLPKMIARINDWFEEVKAKRGKRPTAFQFLQEIKPEAVAYITIKTTLACLTSADNTTVQAVASAIGRAIEDEARFGRIRDLEAKHFKKNVEEQLNKRVGHVYKKAFMQVVEHDMLSKGLLGGEAWSSWHKEDSIHVGVRCIEMLIESTGMVSLHRQNAGVVGADSETIELAPEYAEAIATRAGALAGISPMFQPCVVPPKPWTGITGGGYWAAGRKPLQLVRTRSLAALRRYEEVSMPEVIKAVNIAQNTAWRINKKVLDVANTITQWQHCPVADVPAMDRGEMPARPLDIDTNEIALKAWKKEASAFYRKDKARMSRRLSMEFMLSQANKFANYEAIWFPQNMDWRGRVYAVPMFNPQGNDMTKGLLTFAQEKPIGEDGFYWLKIHGANTAGVDKVPFPQRIKFVEDNHTNIMECAKAPLENTWWAEQDSPFCFLAFCFEYAGVINSGLSYNCSLPLAFDGSCSGLQHFSAMLRDEIGGKAVNLLPSAEYQDIYRIVSDKVNEMLKQDLINGTSTTVETVTDKKTGEITQRTKYGTKVMAQWWLEHGVNRGVTKRPVMTLVYGSKEFGFRDQVKSDTIQPAIDNGKGDMFLNPNQAAGYMAKLIWNAVSGTVVAAVEAMNWLKSAAKLLAAEVKDEKTDTVLRGRCAVHWVTPDGFPVWQEYKKPIQTRLNLMFLGQFRLQPTINTNKDSEIDARKQVSGIAPNFVHSLDGNHLRMTVVWAHEKYGIESFALIHDSFGTIPADAANLFKAVRETFVDTYESCDVLADFYDQIADQLHESQRDKMPALPAKGKLNLRDILKSDFAFA

SEQ ID NO: 1577 - DNA, 2670 bp, synthetic construct
  misc_feature 1..2670: note = Variant of RNA polymerase
  source 1..2670: mol_type = other DNA
atgcaccatcaccatcaccatatgaacacgattaacattgctaagaacgacttctctgacatcgaactggctgctatcccgttcaacactctggctgaccattacggtgagcgtttagctcgcgaacagttggcccttgagcatgagtcttacgagatgggtgaagcacgcttccgcaagatgtttgagcgtcaacttaaagctggtgaggttgcggataacgctgccgccaagcctctcatcactaccctactccctaagatgattgcacgcatcaacgactggtttgaggaagtgaaagctaagcgcggcaagcgcccgacagccttccagttcctgcaagaaatcaagccggaagccgtagcgtacatcaccattaagaccactctggcttgcctaaccagtgcggacaatacaaccgttcaggctgtagcaagcgcaatcggtcgggccattgaggacgaggctcgcttcggtcgtatccgtgaccttgaagctaagcacttcaagaagaacgttgaggaacaactcaacaagcgcgtagggcacgtctacaagaaagcatttatgcaagttgtcgagcacgacatgctctctaagggtctactcggtggcgaggcgtggtcttcgtggcataaggaagactctattcatgtaggagtacgctgcatcgagatgctcattgagtcaaccggaatggttagcttacaccgccaaaatgctggcgtagtgggtgcagactctgagactatcgaactcgcacctgaatacgctgaggctatcgcaacccgtgcaggtgcgctggctggcatctctccgatgttccaaccttgcgtagttcctcctaagccgtggactggcattactggtggtggctattgggctgcggggcgcaaacccctgcagttagtacgtactcgcagtctggcggcgccgcgccgctatgaagaagtgtcgatgccggaggtcatcaaagcagtcaacattgcgcagaatacagcatggcgtattaacaagaaagttctcgacgtagcgaataccatcacccaatggcagcactgtccagtcgcggatgtgcctgcgatggatcgtggcgaaatgccagctcgtccgttggacatcgataccaacgagattgcacttaaagcgtggaagaaagaagcttccgcgttctaccgcaaagacaaagcacgcatgagccgtcgtctgtcgatggagtttatgttatctcaggcgaacaagtttgcgaattatgaggcaatctggtttccgcaaaacatggattggcgtgggcgcgtgtacgctgtcccgatgttcaatcctcagggcaacgatatgacgaaaggcctgctgacctttgcgcaggagaaacccattggtgaagacggcttctattggctcaagattcatggcgcaaatacagctggagtggataaagtaccgtttccacaacgcatcaaatttgttgaggataaccatacgaatattatggaatgcgcgaaagcaccgctggaaaacacttggtgggcggaacaggactcgccgttctgctttctggcgttctgctttgagtatgctggcgtcatcaatagtggtctgtcgtacaactgtagcttgcctctggcatttgatggtagttgctccggcctgcaacatttctcagcgatgttacgcgacgaaattggcggcaaagctgtgaatctcctcccatctgcggaataccaggatatttatcgtatcgtcagcgacaaagttaacgagatgctgaaacaagatctgattaacggtacctctaccaccgtggaaacggtgactgataaaaagacaggcgaaattacccaacgcacgaaatacgggaccaaagttatggcacagtggtggttagaacacggtgtgaatcgtggcgtcacgaaacgcccggttatgactttggtgtatgggagcaaagagtttggattccgcgatcaagtgctgagtgacaccattcaaccggcgatcgataacggcaagggtgacatgtttctgaatccgaatcaggctgctggttacatggcgaaactgatctggaacgcagtgtccgggaccgtagtcgcagcagttgaggcgatgaactggctgaaaagtgcggcgaaattacttgctgctgaagtgaaggatgagaagacggatacagttctgcgtggccgctgcgcagtacattgggtgactcccgacggcttccctgtgtggcaggaatacaagaagcctattcaaacgcgcttgaacctgatgttcctcggtcagttccgcttacagcctaccattaacaccaacaaagatagcgagattgatgcacgcaaacaggtgtctggtatcgctcctaactttgtacacagcctggacggtaaccaccttcgtatgactgtagtgtgggcacacgagaagtacggaatcgaatcttttgcactgattcacgactccttcggtaccattccggctgacgctgcgaacctgttcaaagcagtgcgcgaaactttcgttgacacatatgagtcttgtgatgtactggctgatttctacgaccagattgctgaccagttgcacgagtctcaacgcgacaaaatgccagcacttccggctaaaggtaagttgaacctccgtgacatcttaaaatcggacttcgcgttcgcg

SEQ ID NO: 1578 - protein, 890 aa, synthetic construct
  REGION 1..890: note = Variant of RNA polymerase
MHHHHHHMNTINIAKNDFSDIELAAIPFNTLADHYGERLAREQLALEHESYEMGEARFRKMFERQLKAGEVADNAAAKPLITTLLPKMIARINDWFEEVKAKRGKRPTAFQFLQEIKPEAVAYITIKTTLACLTSADNTTVQAVASAIGRAIEDEARFGRIRDLEAKHFKKNVEEQLNKRVGHVYKKAFMQVVEHDMLSKGLLGGEAWSSWHKEDSIHVGVRCIEMLIESTGMVSLHRQNAGVVGADSETIELAPEYAEAIATRAGALAGISPMFQPCVVPPKPWTGITGGGYWAAGRKPLQLVRTRSLAAPRRYEEVSMPEVIKAVNIAQNTAWRINKKVLDVANTITQWQHCPVADVPAMDRGEMPARPLDIDTNEIALKAWKKEASAFYRKDKARMSRRLSMEFMLSQANKFANYEAIWFPQNMDWRGRVYAVPMFNPQGNDMTKGLLTFAQEKPIGEDGFYWLKIHGANTAGVDKVPFPQRIKFVEDNHTNIMECAKAPLENTWWAEQDSPFCFLAFCFEYAGVINSGLSYNCSLPLAFDGSCSGLQHFSAMLRDEIGGKAVNLLPSAEYQDIYRIVSDKVNEMLKQDLINGTSTTVETVTDKKTGEITQRTKYGTKVMAQWWLEHGVNRGVTKRPVMTLVYGSKEFGFRDQVLSDTIQPAIDNGKGDMFLNPNQAAGYMAKLIWNAVSGTVVAAVEAMNWLKSAAKLLAAEVKDEKTDTVLRGRCAVHWVTPDGFPVWQEYKKPIQTRLNLMFLGQFRLQPTINTNKDSEIDARKQVSGIAPNFVHSLDGNHLRMTVVWAHEKYGIESFALIHDSFGTIPADAANLFKAVRETFVDTYESCDVLADFYDQIADQLHESQRDKMPALPAKGKLNLRDILKSDFAFA

SEQ ID NO: 1579 - DNA, 2670 bp, synthetic construct
  misc_feature 1..2670: note = Variant of RNA polymerase
  source 1..2670: mol_type = other DNA
atgcaccatcaccatcaccatatgaacacgattaacattgctaagaacgacttctctgacatcgaactggctgctatcccgttcaacactctggctgaccattacggtgagcgtttagctcgcgaacagttggcccttgagcatgagtcttacgagatgggtgaagcacgcttccgcaagatgtttgagcgtcaacttaaagctggtgaggttgcggataacgctgccgccaagcctctcatcactaccctactccctaagatgattgcacgcatcaacgactggtttgaggaagtgaaagctaagcgcggcaagcgcccgacagccttccagttcctgcaagaaatcaagccggaagccgtagcgtacatcaccattaagaccactctggcttgcctaaccagtgcggacaatacaaccgttcaggctgtagcaagcgcaatcggtcgggccattgaggacgaggctcgcttcggtcgtatccgtgaccttgaagctaagcacttcaagaagaacgttgaggaacaactcaacaagcgcgtagggcacgtctacaagaaagcatttatgcaagttgtcgagcacgacatgctctctaagggtctactcggtggcgaggcgtggtcttcgtggcataaggaagactctattcatgtaggagtacgctgcatcgagatgctcattgagtcaaccggaatggttagcttacaccgccaaaatgctggcgtagtgggtgcagactctgagactatcgaactcgcacctgaatacgctgaggctatcgcaacccgtgcaggtgcgctggctggcatctctccgatgttccaaccttgcgtagttcctcctaagccgtggactggcattactggtggtggctattgggctgcggggcgcaaacccctgcagttagtacgtactcgcggtctggcggcgcttcgccgctatgaagaagtgtcgatgccggaggtcatcaaagcagtcaacattgcgcagaatacagcatggcgtattaacaagaaagttctcgacgtagcgaataccatcacccaatggcagcactgtccagtcgcggatgtgcctgcgatggatcgtggcgaaatgccagctcgtccgttggacatcgataccaacgagattgcacttaaagcgtggaagaaagaagcttccgcgttctaccgcaaagacaaagcacgcatgagccgtcgtctgtcgatggagtttatgttatctcaggcgaacaagtttgcgaattatgaggcaatctggtttccgcaaaacatggattggcgtgggcgcgtgtacgctgtcccgatgttcaatcctcagggcaacgatatgacgaaaggcctgctgacctttgcgcaggagaaacccattggtgaagacggcttctattggctcaagattcatggcgcaaatacagctggagtggataaagtaccgtttccacaacgcatcaaatttgttgaggataaccatacgaatattatggaatgcgcgaaagcaccgctggaaaacacttggtgggcggaacaggactcgccgttctgctttctggcgttctgctttgagtatgctggcgtcatcaatagtggtctgtcgtacaactgtagcttgcctctggcatttgatggtagttgctccggcctgcaacatttctcagcgatgttacgcgacgaaattggcggcaaagctgtgaatctcctcccatctgcggaataccaggatatttatcgtatcgtcagcgacaaagttaacgagatgctgaaacaagatctgattaacggtacctctaccaccgtggaaacggtgactgataaaaagacaggcgaaattacccaacgcacgaaatacgggaccaaagttatggcacagtggtggttagaacacggtgtgaatcgtggcgtcacgaaacgcccggttatgactttggtgtatgggagcaaagagtttggattccgcgatcaagtgctgagtgacaccattcaaccggcgatcgataacggcaagggtgacatgtttctgaatccgaatcaggctgctggttacatggcgaaactgatctggaacgcagtgtccgggaccgtagtcgcagcagttgaggcgatgaactggctgaaaagtgcggcgaaattacttgctgctgaagtgaaggatgagaagacggatacagttctgcgtggccgctgcgcagtacattgggtgactcccgacggcttccctgtgtggcaggaatacaagaagcctattcaaacgcgcttgaacctgatgttcctcggtcagttccgcttacagcctaccattaacaccaacaaagatagcgagattgatgcacgcaaacaggtgtctggtatcgctcctaactttgtacacagcctggacggtaaccaccttcgtatgactgtagtgtgggcacacgagaagtacggaatcgaatcttttgcactgattcacgactccttcggtaccattccggctgacgctgcgaacctgttcaaagcagtgcgcgaaactttcgttgacacatatgagtcttgtgatgtactggctgatttctacgaccagattgctgaccagttgcacgagtctcaacgcgacaaaatgccagcacttccggctaaaggtaagttgaacctccgtgacatcttaaaatcggacttcgcgttcgcg

SEQ ID NO: 1580 - protein, 890 aa, synthetic construct
  REGION 1..890: note = Variant of RNA polymerase
MHHHHHHMNTINIAKNDFSDIELAAIPFNTLADHYGERLAREQLALEHESYEMGEARFRKMFERQLKAGEVADNAAAKPLITTLLPKMIARINDWFEEVKAKRGKRPTAFQFLQEIKPEAVAYITIKTTLACLTSADNTTVQAVASAIGRAIEDEARFGRIRDLEAKHFKKNVEEQLNKRVGHVYKKAFMQVVEHDMLSKGLLGGEAWSSWHKEDSIHVGVRCIEMLIESTGMVSLHRQNAGVVGADSETIELAPEYAEAIATRAGALAGISPMFQPCVVPPKPWTGITGGGYWAAGRKPLQLVRTRGLAALRRYEEVSMPEVIKAVNIAQNTAWRINKKVLDVANTITQWQHCPVADVPAMDRGEMPARPLDIDTNEIALKAWKKEASAFYRKDKARMSRRLSMEFMLSQANKFANYEAIWFPQNMDWRGRVYAVPMFNPQGNDMTKGLLTFAQEKPIGEDGFYWLKIHGANTAGVDKVPFPQRIKFVEDNHTNIMECAKAPLENTWWAEQDSPFCFLAFCFEYAGVINSGLSYNCSLPLAFDGSCSGLQHFSAMLRDEIGGKAVNLLPSAEYQDIYRIVSDKVNEMLKQDLINGTSTTVETVTDKKTGEITQRTKYGTKVMAQWWLEHGVNRGVTKRPVMTLVYGSKEFGFRDQVLSDTIQPAIDNGKGDMFLNPNQAAGYMAKLIWNAVSGTVVAAVEAMNWLKSAAKLLAAEVKDEKTDTVLRGRCAVHWVTPDGFPVWQEYKKPIQTRLNLMFLGQFRLQPTINTNKDSEIDARKQVSGIAPNFVHSLDGNHLRMTVVWAHEKYGIESFALIHDSFGTIPADAANLFKAVRETFVDTYESCDVLADFYDQIADQLHESQRDKMPALPAKGKLNLRDILKSDFAFA

SEQ ID NO: 1581 - DNA, 2670 bp, synthetic construct
  misc_feature 1..2670: note = Variant of RNA polymerase
  source 1..2670: mol_type = other DNA
atgcaccatcaccatcaccatatgaacacgattaacattgctaagaacgacttctctgacatcgaactggctgctatcccgttcaacactctggctgaccattacggtgagcgtttagctcgcgaacagttggcccttgagcatgagtcttacgagatgggtgaagcacgcttccgcaagatgtttgagcgtcaacttaaagctggtgaggttgcggataacgctgccgccaagcctctcatcactaccctactccctaagatgattgcacgcatcaacgactggtttgaggaagtgaaagctaagcgcggcaagcgcccgacagccttccagttcctgcaagaaatcaagccggaagccgtagcgtacatcaccattaagaccactctggcttgcctaaccagtgcggacaatacaaccgttcaggctgtagcaagcgcaatcggtcgggccattgaggacgaggctcgcttcggtcgtatccgtgaccttgaagctaagcacttcaagaagaacgttgaggaacaactcaacaagcgcgtagggcacgtctacaagaaagcatttatgcaagttgtcgagcacgacatgctctctaagggtctactcggtggcgaggcgtggtcttcgtggcataaggaagactctattcatgtaggagtacgctgcatcgagatgctcattgagtcaaccggaatggttagcttacaccgccaaaatgctggcgtagtgggtgcagactctgagactatcgaactcgcacctgaatacgctgaggctatcgcaacccgtgcaggtgcgctggctggcatctctccgatgttccaaccttgcgtagttcctcctaagccgtggactggcattactggtggtggctattgggctgcggggcgcaaacccctgcagttagtacgtactcgcagtctgaaggcgcttcgccgctatgaagaagtgtcgatgccggaggtcatcaaagcagtcaacattgcgcagaatacagcatggcgtattaacaagaaagttctcgacgtagcgaataccatcacccaatggcagcactgtccagtcgcggatgtgcctgcgatggatcgtggcgaaatgccagctcgtccgttggacatcgataccaacgagattgcacttaaagcgtggaagaaagcggcttcggcgttctaccgcaaagacaaagcacgcatgagccgtcgtctgtcgatggagtttatgttatctcaggcgaacaagtttgcgaattatgaggcaatctggtttccgcaaaacatggattggcgtgggcgcgtgtacgctgtcccgatgttcaatcctcagggcaacgatatgacgaaaggcctgctgacctttgcgcaggagaaacccattggtgaagacggcttctattggctcaagattcatggcgcaaatacagctggagtggataaagtaccgtttccacaacgcatcaaatttgttgaggataaccatacgaatattatggaatgcgcgaaagcaccgctggaaaacacttggtgggcggaacaggactcgccgttctgctttctggcgttctgctttgagtatgctggcgtcatcaatagtggtctgtcgtacaactgtagcttgcctctggcatttgatggtagttgctccggcctgcaacatttctcagcgatgttacgcgacgaaattggcggcaaagctgtgaatctcctcccatctgcggaataccaggatatttatcgtatcgtcagcgacaaagttaacgagatgctgaaacaagatctgattaacggtacctctaccaccgtggaaacggtgactgataaaaagacaggcgaaattacccaacgcacgaaatacgggaccaaagttatggcacagtggtggttagaacacggtgtgaatcgtggcgtcacgaaacgcccggttatgactttggtgtatgggagcaaagagtttggattccgcgatcaagtgctgagtgacaccattcaaccggcgatcgataacggcaagggtctgatgtttctgaatccgaatcaggctgctggttacatggcgaaactgatctggaacgcagtgtccgggaccgtagtcgcagcagttgaggcgatgaactggctgaaaagtgcggcgaaattacttgctgctgaagtgaaggatgagaagacggatacagttctgcgtggccgctgcgcagtacattgggtgactcccgacggcttccctgtgtggcaggaatacaagaagcctattcaaacgcgcttgaacctgatgttcctcggtcagttccgcttacagcctaccattaacaccaacaaagatagcgagattgatgcacgcaaacaggtgtctggtatcgctcctaactttgtacacagcctggacggtaaccaccttcgtatgactgtagtgtgggcacacgagaagtacggaatcgaatcttttgcactgattcacgactccttcggtaccattccggctgacgctgcgaacctgttcaaagcagtgcgcgaaactttcgttgacacatatgagtcttgtgatgtactggctgatttctacgaccagattgctgaccagttgcacgagtctcaacgcgacaaaatgccagcacttccggctaaaggtaagttgaacctccgtgacatcttaaaatcggacttcgcgttcgcg

SEQ ID NO: 1582 - protein, 890 aa, synthetic construct
  REGION 1..890: note = Variant of RNA polymerase
MHHHHHHMNTINIAKNDFSDIELAAIPFNTLADHYGERLAREQLALEHESYEMGEARFRKMFERQLKAGEVADNAAAKPLITTLLPKMIARINDWFEEVKAKRGKRPTAFQFLQEIKPEAVAYITIKTTLACLTSADNTTVQAVASAIGRAIEDEARFGRIRDLEAKHFKKNVEEQLNKRVGHVYKKAFMQVVEHDMLSKGLLGGEAWSSWHKEDSIHVGVRCIEMLIESTGMVSLHRQNAGVVGADSETIELAPEYAEAIATRAGALAGISPMFQPCVVPPKPWTGITGGGYWAAGRKPLQLVRTRSLKALRRYEEVSMPEVIKAVNIAQNTAWRINKKVLDVANTITQWQHCPVADVPAMDRGEMPARPLDIDTNEIALKAWKKAASAFYRKDKARMSRRLSMEFMLSQANKFANYEAIWFPQNMDWRGRVYAVPMFNPQGNDMTKGLLTFAQEKPIGEDGFYWLKIHGANTAGVDKVPFPQRIKFVEDNHTNIMECAKAPLENTWWAEQDSPFCFLAFCFEYAGVINSGLSYNCSLPLAFDGSCSGLQHFSAMLRDEIGGKAVNLLPSAEYQDIYRIVSDKVNEMLKQDLINGTSTTVETVTDKKTGEITQRTKYGTKVMAQWWLEHGVNRGVTKRPVMTLVYGSKEFGFRDQVLSDTIQPAIDNGKGLMFLNPNQAAGYMAKLIWNAVSGTVVAAVEAMNWLKSAAKLLAAEVKDEKTDTVLRGRCAVHWVTPDGFPVWQEYKKPIQTRLNLMFLGQFRLQPTINTNKDSEIDARKQVSGIAPNFVHSLDGNHLRMTVVWAHEKYGIESFALIHDSFGTIPADAANLFKAVRETFVDTYESCDVLADFYDQIADQLHESQRDKMPALPAKGKLNLRDILKSDFAFA

SEQ ID NO: 1583 - DNA, 2670 bp, synthetic construct
  misc_feature 1..2670: note = Variant of RNA polymerase
  source 1..2670: mol_type = other DNA
atgcaccatcaccatcaccatatgaacacgattaacattgctaagaacgacttctctgacatcgaactggctgctatcccgttcaacactctggctgaccattacggtgagcgtttagctcgcgaacagttggcccttgagcatgagtcttacgagatgggtgaagcacgcttccgcaagatgtttgagcgtcaacttaaagctggtgaggttgcggataacgctgccgccaagcctctcatcactaccctactccctaagatgattgcacgcatcaacgactggtttgaggaagtgaaagctaagcgcggcaagcgcccgacagccttccagttcctgcaagaaatcaagccggaagccgtagcgtacatcaccattaagaccactctggcttgcctaaccagtgcggacaatacaaccgttcaggctgtagcaagcgcaatcggtcgggccattgaggacgaggctcgcttcggtcgtatccgtgaccttgaagctaagcacttcaagaagaacgttgaggaacaactcaacaagcgcgtagggcacgtctacaagaaagcatttatgcaagttgtcgagcacgacatgctctctaagggtctactcggtggcgaggcgtggtcttcgtggcataaggaagactctattcatgtaggagtacgctgcatcgagatgctcattgagtcaaccggaatggttagcttacaccgccaaaatgctggcgtagtgggtgcagactctgagactatcgaactcgcacctgaatacgctgaggctatcgcaacccgtgcaggtgcgctggctggcatctctccgatgttccaaccttgcgtagttcctcctaagccgtggactggcattactggtggtggctattgggctgcggggcgcaaacccctgcagttagtacgtactcgcagtctgaaggcgcttcgccgctatgaagaagtgtcgatgccggaggtcatcaaagcagtcaacattgcgcagaatacagcatggcgtattaacaagaaagttctcgacgtagcgaataccatcacccaatggcagcactgtccagtcgccgatattcctgcgatggatcgtggcgaaatgccagctaagccgttggacatcgataccaacgagattgcacttaaagcgtggaagaaagaagcttccgcgttctaccgcaaagacaaagcacgcatgagccgtcgtctgtcgatggagtttatgttatctcaggcgaacaagtttgcgaattatgaggcaatctggtttccgcaaaacatggattggcgtgggcgcgtgtacgctgtcccgatgttcaatcctcagggcaacgatatgacgaaaggcctgctgacctttgcgcaggagaaacccattggtgaagacggcttctattggctcaagattcatggcgcaaatacagctggagtggataaagtaccgtttccacaacgcatcaaatttgttgaggataaccatacgaatattatggaatgcgcgaaagcaccgctggaaaacacttggtgggcggaacaggactcgccgttctgctttctggcgttctgctttgagtatgctggcgtcatcaatagtggtctgtcgtacaactgtagcttgcctctggcatttgatggtagttgctccggcctgcaacatttctcagcgatgttacgcgacgaaattggcggcaaagctgtgaatctcctcccatctgcggaataccaggatatttatcgtatcgtcagcgacaaagttaacgagatgctgaaacaagatctgattaacggtacctctaccaccgtggaaacggtgactgataaaaagacaggcgaaattacccaacgcacgaaatacgggaccaaagttatggcagggtggtggttagaacacggtgtgaatcgtggcgtcacgaaacgcccggttatgactttggtgtatgggagcaaagagtttggattccgcgatcaagtgctgagtgacaccattcaaccggcgatcgataacggcaagggtgacatgtttctgaatccgaatcaggctgctggttacatggcgaaactgatctggaacgcggtgtccgggaccgtagtcgcagcagttgaggcgatgaactggctgaaaagtgcggcgaaattacttgctgctgaagtgaaggatgagaagacggatacagttctgcgtggccgctgcgcagtacattgggtgactcccgacggcttccctgtgtggcaggaatacaagaagcctattcaaacgcgcttgaacctgatgttcctcggtcagttccgcttacagcctaccattaacaccaacaaagatagcgagattgatgcacgcaaacaggtgtctggtatcgctcctaactttgtacacagcctggacggtaaccaccttcgtatgactgtagtgtgggcacacgagaagtacggaatcgaatcttttgcactgattcacgactccttcggtaccattccggctgacgctgcgaacctgttcaaagcagtgcgcgaaactttcgttgacacatatgagtcttgtgatgtactggctgatttctacgaccagattgctgaccagttgcacgagtctcaacgcgacaaaatgccagcacttccggctaaaggtaagttgaacctccgtgacatcttaaaatcggacttcgcgttcgcg

SEQ ID NO: 1584 - protein, 890 aa, synthetic construct
  REGION 1..890: note = Variant of RNA polymerase
MHHHHHHMNTINIAKNDFSDIELAAIPFNTLADHYGERLAREQLALEHESYEMGEARFRKMFERQLKAGEVADNAAAKPLITTLLPKMIARINDWFEEVKAKRGKRPTAFQFLQEIKPEAVAYITIKTTLACLTSADNTTVQAVASAIGRAIEDEARFGRIRDLEAKHFKKNVEEQLNKRVGHVYKKAFMQVVEHDMLSKGLLGGEAWSSWHKEDSIHVGVRCIEMLIESTGMVSLHRQNAGVVGADSETIELAPEYAEAIATRAGALAGISPMFQPCVVPPKPWTGITGGGYWAAGRKPLQLVRTRSLKALRRYEEVSMPEVIKAVNIAQNTAWRINKKVLDVANTITQWQHCPVADIPAMDRGEMPAKPLDIDTNEIALKAWKKEASAFYRKDKARMSRRLSMEFMLSQANKFANYEAIWFPQNMDWRGRVYAVPMFNPQGNDMTKGLLTFAQEKPIGEDGFYWLKIHGANTAGVDKVPFPQRIKFVEDNHTNIMECAKAPLENTWWAEQDSPFCFLAFCFEYAGVINSGLSYNCSLPLAFDGSCSGLQHFSAMLRDEIGGKAVNLLPSAEYQDIYRIVSDKVNEMLKQDLINGTSTTVETVTDKKTGEITQRTKYGTKVMAGWWLEHGVNRGVTKRPVMTLVYGSKEFGFRDQVLSDTIQPAIDNGKGDMFLNPNQAAGYMAKLIWNAVSGTVVAAVEAMNWLKSAAKLLAAEVKDEKTDTVLRGRCAVHWVTPDGFPVWQEYKKPIQTRLNLMFLGQFRLQPTINTNKDSEIDARKQVSGIAPNFVHSLDGNHLRMTVVWAHEKYGIESFALIHDSFGTIPADAANLFKAVRETFVDTYESCDVLADFYDQIADQLHESQRDKMPALPAKGKLNLRDILKSDFAFA

SEQ ID NO: 1585 - DNA, 2670 bp, synthetic construct
  misc_feature 1..2670: note = Variant of RNA polymerase
  source 1..2670: mol_type = other DNA
atgcaccatcaccatcaccatatgaacacgattaacattgctaagaacgacttctctgacatcgaactggctgctatcccgttcaacactctggctgaccattacggtgagcgtttagctcgcgaacagttggcccttgagcatgagtcttacgagatgggtgaagcacgcttccgcaagatgtttgagcgtcaacttaaagctggtgaggttgcggataacgctgccgccaagcctctcatcactaccctactccctaagatgattgcacgcatcaacgactggtttgaggaagtgaaagctaagcgcggcaagcgcccgacagccttccagttcctgcaagaaatcaagccggaagccgtagcgtacatcaccattaagaccactctggcttgcctaaccagtgcggacaatacaaccgttcaggctgtagcaagcgcaatcggtcgggccattgaggacgaggctcgcttcggtcgtatccgtgaccttgaagctaagcacttcaagaagaacgttgaggaacaactcaacaagcgcgtagggcacgtctacaagaaagcatttatgcaagttgtcgagcacgacatgctctctaagggtctactcggtggcgaggcgtggtcttcgtggcataaggaagactctattcatgtaggagtacgctgcatcgagatgctcattgagtcaaccggaatggttagcttacaccgccaaaatgctggcgtagtgggtgcagactctgagactatcgaactcgcacctgaatacgctgaggctatcgcaacccgtgcaggtgcgctggctggcatctctccgatgttccaaccttgcgtagttcctcctaagccgtggactggcattactggtggtggctattgggctgcggggcgcaaacccctgcagttagtacgtactcgcagtctggcggcgcttcgccgctatgaagaagtgtcgatgccggaggtcatcaaagcagtcaacattgcgcagaatacagcatggcgtattaacaagaaagttctcgacgtagcgaataccatcacccaatggcagcactgtccagtcgcggatgtgcctgcgatggatcgtggcgaaatgccagctcgtccgttggacatcgataccaaccctattgcacttaaagcgtggaagaaagaggcttcggcgttctaccgcaaagacaaagcacgcatgagccgtcgtctgtcgatggagtttatgttatctcaggcgaacaagtttgcgaattatgaggcaatctggtttccgcaaaacatggattggcgtgggcgcgtgtacgctgtcccgatgttcaatcctcagggcaacgatatgacgaaaggcctgctgacctttgcgcaggagaaacccattggtgaagacggcttctattggctcaagattcatggcgcaaatacagctggagtggataaagtaccgtttccacaacgcatcaaatttgttgaggataaccatacgaatattatggaatgcgcgaaagcaccgctggaaaacacttggtgggcggaacaggactcgccgttctgctttctggcgttctgctttgagtatgctggcgtcatcaatagtggtctgtcgtacaactgtagcttgcctctggcatttgatggtagttgctccggcctgcaacatttctcagcgatgttacgcgacgaagttggcggcaaagctgtgaatctcctcccatctgcggaataccaggatatttatcgtatcgtcagcgacaaagttaacgagatgctgaaacaagatctgattaacggtacctctaccaccgtggaaacggtgactgataaaaagacaggcgaaattacccaacgcacgaaatacgggaccaaagttatggcacaatggtggttagaacacggtgtgaatcgtggcgtcacgaaacgcccggttatgactttggtgtatgggagcaaagagtttggattccgcgatcaagtgctgagtgacaccattcaaccggcgatcgataacggcaagggtgacatgtttctgaatccgaatcaggctgctggttacatggcgaaactgatctggaacgcagtgtccgggaccgtagtcgcagcagttgaggcgatgaactggctgaaaagtgcggcgaaattacttgctgctgaagtgaaggatgagaagacggatacagttctgcgtggccgctgcgcagtacattgggtgactcccgacggcttccctgtgtggcaggaatacaagaagcctattcaaacgcgcttgaacctgatgttcctcggtcagttccgcttacagcctaccattaacaccaacaaagatagcgagattgatgcacgcaaacaggtgtctggtatcgctcctaactttgtacacagcctggacggtaaccaccttcgtatgactgtagtgtgggcacacgagaagtacggaatcgaatcttttgcactgattcacgactccttcggtaccattccggctgacgctgcgaacctgttcaaagcagtgcgcgaaactttcgttgacacatatgagtcttgtgatgtactggctgatttctacgaccagattgctgaccagttgcacgagtctcaacgcgacaaaatgccagcacttccggctaaaggtaagttgaacctccgtgacatcttaaaatcggacttcgcgttcgcg

SEQ ID NO: 1586 - protein, 890 aa, synthetic construct
  REGION 1..890: note = Variant of RNA polymerase
MHHHHHHMNTINIAKNDFSDIELAAIPFNTLADHYGERLAREQLALEHESYEMGEARFRKMFERQLKAGEVADNAAAKPLITTLLPKMIARINDWFEEVKAKRGKRPTAFQFLQEIKPEAVAYITIKTTLACLTSADNTTVQAVASAIGRAIEDEARFGRIRDLEAKHFKKNVEEQLNKRVGHVYKKAFMQVVEHDMLSKGLLGGEAWSSWHKEDSIHVGVRCIEMLIESTGMVSLHRQNAGVVGADSETIELAPEYAEAIATRAGALAGISPMFQPCVVPPKPWTGITGGGYWAAGRKPLQLVRTRSLAALRRYEEVSMPEVIKAVNIAQNTAWRINKKVLDVANTITQWQHCPVADVPAMDRGEMPARPLDIDTNPIALKAWKKEASAFYRKDKARMSRRLSMEFMLSQANKFANYEAIWFPQNMDWRGRVYAVPMFNPQGNDMTKGLLTFAQEKPIGEDGFYWLKIHGANTAGVDKVPFPQRIKFVEDNHTNIMECAKAPLENTWWAEQDSPFCFLAFCFEYAGVINSGLSYNCSLPLAFDGSCSGLQHFSAMLRDEVGGKAVNLLPSAEYQDIYRIVSDKVNEMLKQDLINGTSTTVETVTDKKTGEITQRTKYGTKVMAQWWLEHGVNRGVTKRPVMTLVYGSKEFGFRDQVLSDTIQPAIDNGKGDMFLNPNQAAGYMAKLIWNAVSGTVVAAVEAMNWLKSAAKLLAAEVKDEKTDTVLRGRCAVHWVTPDGFPVWQEYKKPIQTRLNLMFLGQFRLQPTINTNKDSEIDARKQVSGIAPNFVHSLDGNHLRMTVVWAHEKYGIESFALIHDSFGTIPADAANLFKAVRETFVDTYESCDVLADFYDQIADQLHESQRDKMPALPAKGKLNLRDILKSDFAFA

SEQ ID NO: 1587 - DNA, 2670 bp, synthetic construct
  misc_feature 1..2670: note = Variant of RNA polymerase
  source 1..2670: mol_type = other DNA
atgcaccatcaccatcaccatatgaacacgattaacattgctaagaacgacttctctgacatcgaactggctgctatcccgttcaacactctggctgaccattacggtgagcgtttagctcgcgaacagttggcccttgagcatgagtcttacgagatgggtgaagcacgcttccgcaagatgtttgagcgtcaacttaaagctggtgaggttgcggataacgctgccgccaagcctctcatcactaccctactccctaagatgattgcacgcatcaacgactggtttgaggaagtgaaagctaagcgcggcaagcgcccgacagccttccagttcctgcaagaaatcaagccggaagccgtagcgtacatcaccattaagaccactctggcttgcctaaccagtgcggacaatacaaccgttcaggctgtagcaagcgcaatcggtcgggccattgaggacgaggctcgcttcggtcgtatccgtgaccttgaagctaagcacttcaagaagaacgttgaggaacaactcaacaagcgcgtagggcacgtctacaagaaagcatttatgcaagttgtcgagcacgacatgctctctaagggtctactcggtggcgaggcgtggtcttcgtggcataaggaagactctattcatgtaggagtacgctgcatcgagatgctcattgagtcaaccggaatggttagcttacaccgccaaaatgctggcgtagtgggtgcagactctgagactatcgaactcgcacctgaatacgctgaggctatcgcaacccgtgcaggtgcgctggctggcatctctccgatgttccaaccttgcgtagttcctcctaagccgtggactggcattactggtggtggctattgggctgcggggcgcaaacccctgcagttagtacgtactcgcagtctggcggcgcttcgccgctatgaagaagtgtcgatgccggaggtcatcaaagcagtcaacattgcgcagaatacagcatggcgtattaacaagaaagttctcgacgtagcgaataccatcacccaatggcagcactgtccagtcgcggatgtgcctgcgatggatcgtggcgaaatgccagctaagccgttggacatcgataccaacgagattgcacttaaagcgtggaagaaagaagcttccgcgttctaccgcaaagacaaagcacgcatgagccgtcgtctgtcgatggagtttatgttatctcaggcgaacaagtttgcgaattatgaggcaatctggtttccgcaaaacatggattggcgtgggcgcgtgtacgctgtcccgatgttcaatcctcagggcaacgatatgacgaaaggcctgctgacctttgcgcaggagaaacccattggtgaagacggcttctattggctcaagattcatggcgcaaatacagctggagtggataaagtaccgtttccacaacgcatcaaatttgttgaggataaccatacgaatattatggaatgcgcgaaagcaccgctggaaaacacttggtgggcggaacaggactcgccgttctgctttctggcgttctgctttgagtatgctggcgtcatcaatagtggtctgtcgtacaactgtagcttgcctctggcatttgatggtagttgctccggcctgcaacatttctcagcgatgttacgcgacgaaattggcggcaaagctgtgaatctcctcccatctgcggaataccaggatatttatcgtatcgtcagcgacaaagttaacgagatgctgaaacaagatctgattaacggtacctctaccaccgtggaaacggtgactgataaaaagacaggcgaaattacccaacgcacgaaatacgggaccaaagttatggcacagtggtggttagaacacggtgtgaatcgtggcgtcacgaaacgcccggttatgactttggtgtatgggagcaaagagtttggattccgcgatcaagtgctgagtgacaccattcaaccggcgatcgataacggcaagggtgacatgtttctgaatccgaatcaggctgctggttacatggcgaaactgatctggaacgcagtgtccgggaccgtagtcgcagcagttgaggcgatgaactggctgaaaagtgcggcgaaattacttgctgctgaagtgaaggatgagaagacggatacagttctgcgtggccgctgcgcagtacattgggtgactcccgacggcttccctgtgtggcaggaatacaagaagcctattcaaacgcgcttgaacctgatgttcctcggtcagttccgcttacagcctaccattaacaccaacaaagatagcgagattgatgcacgcaaacaggtgtctggtatcgctcctaactttgtacacagcctggacggtaaccaccttcgtatgactgtagtgtgggcacacgagaagtacggaatcgaatcttttgcactgattcacgactccttcggtaccattccggctgacgctgcgaacctgttcaaagcagtgcgcgaaactttcgttgacacatatgagtcttgtgatgtactggctgatttctacgaccagattgctgaccagttgcacgagtctcaacgcgacaaaatgccagcacttccggctaaaggtaagttgaacctccgtgacatcttaaaatcggacttcgcgttcgcg

SEQ ID NO: 1588 - protein, 890 aa, synthetic construct
  REGION 1..890: note = Variant of RNA polymerase
MHHHHHHMNTINIAKNDFSDIELAAIPFNTLADHYGERLAREQLALEHESYEMGEARFRKMFERQLKAGEVADNAAAKPLITTLLPKMIARINDWFEEVKAKRGKRPTAFQFLQEIKPEAVAYITIKTTLACLTSADNTTVQAVASAIGRAIEDEARFGRIRDLEAKHFKKNVEEQLNKRVGHVYKKAFMQVVEHDMLSKGLLGGEAWSSWHKEDSIHVGVRCIEMLIESTGMVSLHRQNAGVVGADSETIELAPEYAEAIATRAGALAGISPMFQPCVVPPKPWTGITGGGYWAAGRKPLQLVRTRSLAALRRYEEVSMPEVIKAVNIAQNTAWRINKKVLDVANTITQWQHCPVADVPAMDRGEMPAKPLDIDTNEIALKAWKKEASAFYRKDKARMSRRLSMEFMLSQANKFANYEAIWFPQNMDWRGRVYAVPMFNPQGNDMTKGLLTFAQEKPIGEDGFYWLKIHGANTAGVDKVPFPQRIKFVEDNHTNIMECAKAPLENTWWAEQDSPFCFLAFCFEYAGVINSGLSYNCSLPLAFDGSCSGLQHFSAMLRDEIGGKAVNLLPSAEYQDIYRIVSDKVNEMLKQDLINGTSTTVETVTDKKTGEITQRTKYGTKVMAQWWLEHGVNRGVTKRPVMTLVYGSKEFGFRDQVLSDTIQPAIDNGKGDMFLNPNQAAGYMAKLIWNAVSGTVVAAVEAMNWLKSAAKLLAAEVKDEKTDTVLRGRCAVHWVTPDGFPVWQEYKKPIQTRLNLMFLGQFRLQPTINTNKDSEIDARKQVSGIAPNFVHSLDGNHLRMTVVWAHEKYGIESFALIHDSFGTIPADAANLFKAVRETFVDTYESCDVLADFYDQIADQLHESQRDKMPALPAKGKLNLRDILKSDFAFA

SEQ ID NO: 1589 - DNA, 2670 bp, synthetic construct
  misc_feature 1..2670: note = Variant of RNA polymerase
  source 1..2670: mol_type = other DNA
atgcaccatcaccatcaccatatgaacacgattaacattgctaagaacgacttctctgacatcgaactggctgctatcccgttcaacactctggctgaccattacggtgagcgtttagctcgcgaacagttggcccttgagcatgagtcttacgagatgggtgaagcacgcttccgcaagatgtttgagcgtcaacttaaagctggtgaggttgcggataacgctgccgccaagcctctcatcactaccctactccctaagatgattgcacgcatcaacgactggtttgaggaagtgaaagctaagcgcggcaagcgcccgacagccttccagttcctgcaagaaatcaagccggaagccgtagcgtacatcaccattaagaccactctggcttgcctaaccagtgcggacaatacaaccgttcaggctgtagcaagcgcaatcggtcgggccattgaggacgaggctcgcttcggtcgtatccgtgaccttgaagctaagcacttcaagaagaacgttgaggaacaactcaacaagcgcgtagggcacgtctacaagaaagcatttatgcaagttgtcgagcacgacatgctctctaagggtctactcggtggcgaggcgtggtcttcgtggcataaggaagactctattcatgtaggagtacgctgcatcgagatgctcattgagtcaaccggaatggttagcttacaccgccaaaatgctggcgtagtgggtgcagactctgagactatcgaactcgcacctgaatacgctgaggctatcgcaacccgtgcaggtgcgctggctggcatctctccgatgttccaaccttgcgtagttcctcctaagccgtggactggcattactggtggtggctattgggctgcggggcgcaaacccctgcagttagtacgtactcgcagtctggcggcgcttcgccgctatgaagaagtgtcgatgccggaggtcatcaaagcagtcaacattgcgcagaatacagcatggcgtattaacaagaaagttctcgacgtagcgaataccatcacccaatggcagcactgtccagtcgccgatattcctgcgatggatcgtggcgaaatgccagctcgtccgttggacatcgataccaacgagattgcacttaaagcgtggaagaaagaagcttccgcgttctaccgcaaagacaaagcacgcatgagccgtcgtctgtcgatggagtttatgttatctcaggcgaacaagtttgcgaattatgaggcaatctggtttccgcaaaacatggattggcgtgggcgcgtgtacgctgtcccgatgttcaatcctcagggcaacgatatgacgaaaggcctgctgacctttgcgcaggagaaacccattggtgaagacggcttctattggctcaagattcatggcgcaaatacagctggagtggataaagtaccgtttccacaacgcatcaaatttgttgaggataaccatacgaatattatggaatgcgcgaaagcaccgctggaaaacacttggtgggcggaacaggactcgccgttctgctttctggcgttctgctttgagtatgctggcgtcatcaatagtggtctgtcgtacaactgtagcttgcctctggcatttgatggtagttgctccggcctgcaacatttctcagcgatgttacgcgacgaaattggcggcaaagctgtgaatctcctcccatctgcggaataccaggatatttatcgtatcgtcagcgacaaagttaacgagatgctgaaacaagatctgattaacggtacctctaccaccgtggaaacggtgactgataaaaagacaggcgaaattacccaacgcacgaaatacgggaccaaagttatggcacagtggtggttagaacacggtgtgaatcgtggcgtcacgaaacgcccggttatgactttggtgtatgggagcaaagagtttggattccgcgatcaagtgctgagtgacaccattcaaccggcgatcgataacggcaagggtgacatgtttctgaatccgaatcaggctgctggttacatggcgaaactgatctggaacgcagtgtccgggaccgtagtcgcagcagttgaggcgatgaactggctgaaaagtgcggcgaaattacttgctgctgaagtgaaggatgagaagacggatacaattctgcgtggccgctgcgcagtacattgggtgactcccgacggcttccctgtgtggcaggaatacaagaagcctattcaaacgcgcttgaacctgatgttcctcggtcagttccgcttacagcctaccattaacaccaacaaagatagcgagattgatgcacgcaaacaggtgtctggtatcgctcctaactttgtacacagcctggacggtaaccaccttcgtatgactgtagtgtgggcacacgagaagtacggaatcgaatcttttgcactgattcacgactccttcggtaccattccggctgacgctgcgaacctgttcaaagcagtgcgcgaaactttcgttgacacatatgagtcttgtgatgtactggctgatttctacgaccagattgctgaccagttgcacgagtctcaacgcgacaaaatgccagcacttccggctaaaggtaagttgaacctccgtgacatcttaaaatcggacttcgcgttcgcg

SEQ ID NO: 1590 - protein, 890 aa, synthetic construct
  REGION 1..890: note = Variant of RNA polymerase
MHHHHHHMNTINIAKNDFSDIELAAIPFNTLADHYGERLAREQLALEHESYEMGEARFRKMFERQLKAGEVADNAAAKPLITTLLPKMIARINDWFEEVKAKRGKRPTAFQFLQEIKPEAVAYITIKTTLACLTSADNTTVQAVASAIGRAIEDEARFGRIRDLEAKHFKKNVEEQLNKRVGHVYKKAFMQVVEHDMLSKGLLGGEAWSSWHKEDSIHVGVRCIEMLIESTGMVSLHRQNAGVVGADSETIELAPEYAEAIATRAGALAGISPMFQPCVVPPKPWTGITGGGYWAAGRKPLQLVRTRSLAALRRYEEVSMPEVIKAVNIAQNTAWRINKKVLDVANTITQWQHCPVADIPAMDRGEMPARPLDIDTNEIALKAWKKEASAFYRKDKARMSRRLSMEFMLSQANKFANYEAIWFPQNMDWRGRVYAVPMFNPQGNDMTKGLLTFAQEKPIGEDGFYWLKIHGANTAGVDKVPFPQRIKFVEDNHTNIMECAKAPLENTWWAEQDSPFCFLAFCFEYAGVINSGLSYNCSLPLAFDGSCSGLQHFSAMLRDEIGGKAVNLLPSAEYQDIYRIVSDKVNEMLKQDLINGTSTTVETVTDKKTGEITQRTKYGTKVMAQWWLEHGVNRGVTKRPVMTLVYGSKEFGFRDQVLSDTIQPAIDNGKGDMFLNPNQAAGYMAKLIWNAVSGTVVAAVEAMNWLKSAAKLLAAEVKDEKTDTILRGRCAVHWVTPDGFPVWQEYKKPIQTRLNLMFLGQFRLQPTINTNKDSEIDARKQVSGIAPNFVHSLDGNHLRMTVVWAHEKYGIESFALIHDSFGTIPADAANLFKAVRETFVDTYESCDVLADFYDQIADQLHESQRDKMPALPAKGKLNLRDILKSDFAFA

SEQ ID NO: 1591 - DNA, 2670 bp, synthetic construct
  misc_feature 1..2670: note = Variant of RNA polymerase
  source 1..2670: mol_type = other DNA
atgcaccatcaccatcaccatatgaacacgattaacattgctaagaacgacttctctgacatcgaactggctgctatcccgttcaacactctggctgaccattacggtgagcgtttagctcgcgaacagttggcccttgagcatgagtcttacgagatgggtgaagcacgcttccgcaagatgtttgagcgtcaacttaaagctggtgaggttgcggataacgctgccgccaagcctctcatcactaccctactccctaagatgattgcacgcatcaacgactggtttgaggaagtgaaagctaagcgcggcaagcgcccgacagccttccagttcctgcaagaaatcaagccggaagccgtagcgtacatcaccattaagaccactctggcttgcctaaccagtgcggacaatacaaccgttcaggctgtagcaagcgcaatcggtcgggccattgaggacgaggctcgcttcggtcgtatccgtgaccttgaagctaagcacttcaagaagaacgttgaggaacaactcaacaagcgcgtagggcacgtctacaagaaagcatttatgcaagttgtcgagcacgacatgctctctaagggtctactcggtggcgaggcgtggtcttcgtggcataaggaagactctattcatgtaggagtacgctgcatcgagatgctcattgagtcaaccggaatggttagcttacaccgccaaaatgctggcgtagtgggtgcagactctgagactatcgaactcgcacctgaatacgctgaggctatcgcaacccgtgcaggtgcgctggctggcatctctccgatgttccaaccttgcgtagttcctcctaagccgtggactggcattactggtggtggctattgggctgcggggcgcaaacccctgcagttagtacgtactcgcagtctggcggcggtgcgccgctatgaagaagtgtcgatgccggaggtcatcaaagcagtcaacattgcgcagaatacagcatggcgtattaacaagaaagttctcgacgtagcgaataccatcacccaatggcagcactgtccagtcgcggatgtgcctgcgatggatcgtggcgaaatgccagctcgtccgttggacatcgataccaacgagattgcacttaaagcgtggaagaaagaagcttccgcgttctaccgcaaagacaaagcacgcatgagccgtcgtctgtcgatggagtttatgttatctcaggcgaacaagtttgcgaattatgaggcaatctggtttccgcaaaacatggattggcgtgggcgcgtgtacgctgtcccgatgttcaatcctcagggcaacgatatgacgaaaggcctgctgacctttgcgcaggagaaacccattggtgaagacggcttctattggctcaagattcatggcgcaaatacagctggagtggataaagtaccgtttccacaacgcatcaaatttgttgaggataaccatacgaatattatggaatgcgcgaaagcaccgctggaaaacacttggtgggcggaacaggactcgccgttctgctttctggcgttctgctttgagtatgctggcgtcatcaatagtggtctgtcgtacaactgtagcttgcctctggcatttgatggtagttgctccggcctgcaacatttctcagcgatgttacgcgacgaaattggcggcaaagctgtgaatctcctcccatctgcggaataccaggatatttatcgtatcgtcagcgacaaagttaacgagatgctgaaacaagatctgattaacggtacctctaccaccgtggaaacggtgactgataaaaagacaggcgaaattacccaacgcacgaaatacgggaccaaagttatggcacagtggtggttagaacacggtgtgaatcgtggcgtcacgaaacgcccggttatgactttggtgtatgggagcaaagagtttggattccgcgatcaagtgctgagtgacaccattcaaccggcgatcgataacggcaagggtgacatgtttctgaatccgaatcaggctgctggttacatggcgaaactgatctggaacgcagtgtccgggaccgtagtcgcagcagttgaggcgatgaactggctgaaaagtgcggcgaaattacttgctgctgaagtgaaggatgagaagacggatacagttctgcgtggccgctgcgcagtacattgggtgactcccgacggcttccctgtgtggcaggaatacaagaagcctattcaaacgcgcttgaacctgatgttcctcggtcagttccgcttacagcctaccattaacaccaacaaagatagcgagattgatgcacgcaaacaggtgtctggtatcgctcctaactttgtacacagcctggacggtaaccaccttcgtatgactgtagtgtgggcacacgagaagtacggaatcgaatcttttgcactgattcacgactccttcggtaccattccggctgacgctgcgaacctgttcaaagcagtgcgcgaaactttcgttgacacatatgagtcttgtgatgtactggctgatttctacgaccagattgctgaccagttgcacgagtctcaacgcgacaaaatgccagcacttccggctaaaggtaagttgaacctccgtgacatcttaaaatcggacttcgcgttcgcg

SEQ ID NO: 1592 - protein, 890 aa, synthetic construct
  REGION 1..890: note = Variant of RNA polymerase
MHHHHHHMNTINIAKNDFSDIELAAIPFNTLADHYGERLAREQLALEHESYEMGEARFRKMFERQLKAGEVADNAAAKPLITTLLPKMIARINDWFEEVKAKRGKRPTAFQFLQEIKPEAVAYITIKTTLACLTSADNTTVQAVASAIGRAIEDEARFGRIRDLEAKHFKKNVEEQLNKRVGHVYKKAFMQVVEHDMLSKGLLGGEAWSSWHKEDSIHVGVRCIEMLIESTGMVSLHRQNAGVVGADSETIELAPEYAEAIATRAGALAGISPMFQPCVVPPKPWTGITGGGYWAAGRKPLQLVRTRSLAAVRRYEEVSMPEVIKAVNIAQNTAWRINKKVLDVANTITQWQHCPVADVPAMDRGEMPARPLDIDTNEIALKAWKKEASAFYRKDKARMSRRLSMEFMLSQANKFANYEAIWFPQNMDWRGRVYAVPMFNPQGNDMTKGLLTFAQEKPIGEDGFYWLKIHGANTAGVDKVPFPQRIKFVEDNHTNIMECAKAPLENTWWAEQDSPFCFLAFCFEYAGVINSGLSYNCSLPLAFDGSCSGLQHFSAMLRDEIGGKAVNLLPSAEYQDIYRIVSDKVNEMLKQDLINGTSTTVETVTDKKTGEITQRTKYGTKVMAQWWLEHGVNRGVTKRPVMTLVYGSKEFGFRDQVLSDTIQPAIDNGKGDMFLNPNQAAGYMAKLIWNAVSGTVVAAVEAMNWLKSAAKLLAAEVKDEKTDTVLRGRCAVHWVTPDGFPVWQEYKKPIQTRLNLMFLGQFRLQPTINTNKDSEIDARKQVSGIAPNFVHSLDGNHLRMTVVWAHEKYGIESFALIHDSFGTIPADAANLFKAVRETFVDTYESCDVLADFYDQIADQLHESQRDKMPALPAKGKLNLRDILKSDFAFA

SEQ ID NO: 1593 - DNA, 2670 bp, synthetic construct
  misc_feature 1..2670: note = Variant of RNA polymerase
  source 1..2670: mol_type = other DNA
atgcaccatcaccatcaccatatgaacacgattaacattgctaagaacgacttctctgacatcgaactggctgctatcccgttcaacactctggctgaccattacggtgagcgtttagctcgcgaacagttggcccttgagcatgagtcttacgagatgggtgaagcacgcttccgcaagatgtttgagcgtcaacttaaagctggtgaggttgcggataacgctgccgccaagcctctcatcactaccctactccctaagatgattgcacgcatcaacgactggtttgaggaagtgaaagctaagcgcggcaagcgcccgacagccttccagttcctgcaagaaatcaagccggaagccgtagcgtacatcaccattaagaccactctggcttgcctaaccagtgcggacaatacaaccgttcaggctgtagcaagcgcaatcggtcgggccattgaggacgaggctcgcttcggtcgtatccgtgaccttgaagctaagcacttcaagaagaacgttgaggaacaactcaacaagcgcgtagggcacgtctacaagaaagcatttatgcaagttgtcgagcacgacatgctctctaagggtctactcggtggcgaggcgtggtcttcgtggcataaggaagactctattcatgtaggagtacgctgcatcgagatgctcattgagtcaaccggaatggttagcttaaggcgccaaaatgctggcgtagtgggtgcagactctgagactatcgaactcgcacctgaatacgctgaggctatcgcaacccgtgcaggtgcgctggctggcatctctccgatgttccaaccttgcgtagttcctcctaagccgtggactggcattactggtggtggctattgggctgcggggcgcaaacccctgcagttagtacgtactcgcagtctggcggcgcttcgccgctatgaagaagtgtcgatgccggaggtcatcaaagcagtcaacattgcgcagaatacagcatggcgtattaacaagaaagttctcgacgtagcgaataccatcacccaatggcagcactgtccagtcgcggatgtgcctgcgatggatcgtggcgaaatgccagctcgtccgttggacatcgataccaacgagattgcacttaaagcgtggaagaaagaagcttccgcgttctaccgcaaagacaaagcacgcatgagccgtcgtctgtcgatggagtttatgttatctcaggcgaacaagtttgcgaattatgaggcaatctggtttccgcaaaacatggattggcgtgggcgcgtgtacgctgtcccgatgttcaatcctcagggcaacgatatgacgaaaggcctgctgacctttgcgcaggagaaacccattggtgaagacggcttctattggctcaagattcatggcgcaaatacagctggagtggataaagtaccgtttccacaacgcatcaaatttgttgaggataaccatacgaatattatggaatgcgcgaaagcaccgctggaaaacacttggtgggcggaacaggactcgccgttctgctttctggcgttctgctttgagtatgctggcgtcatcaatagtggtctgtcgtacaactgtagcttgcctctggcatttgatggtagttgctccggcctgcaacatttctcagcgatgttacgcgacgaaattggcggcaaagctgtgaatctcctcccatctgcggaataccaggatatttatcgtatcgtcagcgacaaagttaacgagatgctgaaacaagatctgattaacggtacctctaccaccgtggaaacggtgactgataaaaagacaggcgaaattacccaacgcacgaaatacgggaccaaagttatggcacagtggtggttagaacacggtgtgaatcgtggcgtcacgaaacgcccggttatgactttggtgtatgggagcaaagagtttggattccgcgatcaagtgctgagtgacaccattcaaccggcgatcgataacggcaagggtgacatgtttctgaatccgaatcaggctgctggttacatggcgaaactgatctggaacgcagtgtccgggaccgtagtcgcagcagttgaggcgatgaactggctgaaaagtgcggcgaaattacttgctgctgaagtgaaggatgagaagacggatacagttctgcgtggccgctgcgcagtacattgggtgactcccgacggcttccctgtgtggcaggaatacaagaagcctattcaaacgcgcttgaacctgatgttcctcggtcagttccgcttacagcctaccattaacaccaacaaagatagcgagattgatgcacgcaaacaggtgtctggtatcgctcctaactttgtacacagcctggacggtaaccaccttcgtatgactgtagtgtgggcacacgagaagtacggaatcgaatcttttgcactgattcacgactccttcggtaccattccggctgacgctgcgaacctgttcaaagcagtgcgcgaaactttcgttgacacatatgagtcttgtgatgtactggctgatttctacgaccagattgctgaccagttgcacgagtctcaacgcgacaaaatgccagcacttccggctaaaggtaagttgaacctccgtgacatcttaaaatcggacttcgcgttcgcg

SEQ ID NO: 1594 - protein, 890 aa, synthetic construct
  REGION 1..890: note = Variant of RNA polymerase
MHHHHHHMNTINIAKNDFSDIELAAIPFNTLADHYGERLAREQLALEHESYEMGEARFRKMFERQLKAGEVADNAAAKPLITTLLPKMIARINDWFEEVKAKRGKRPTAFQFLQEIKPEAVAYITIKTTLACLTSADNTTVQAVASAIGRAIEDEARFGRIRDLEAKHFKKNVEEQLNKRVGHVYKKAFMQVVEHDMLSKGLLGGEAWSSWHKEDSIHVGVRCIEMLIESTGMVSLRRQNAGVVGADSETIELAPEYAEAIATRAGALAGISPMFQPCVVPPKPWTGITGGGYWAAGRKPLQLVRTRSLAALRRYEEVSMPEVIKAVNIAQNTAWRINKKVLDVANTITQWQHCPVADVPAMDRGEMPARPLDIDTNEIALKAWKKEASAFYRKDKARMSRRLSMEFMLSQANKFANYEAIWFPQNMDWRGRVYAVPMFNPQGNDMTKGLLTFAQEKPIGEDGFYWLKIHGANTAGVDKVPFPQRIKFVEDNHTNIMECAKAPLENTWWAEQDSPFCFLAFCFEYAGVINSGLSYNCSLPLAFDGSCSGLQHFSAMLRDEIGGKAVNLLPSAEYQDIYRIVSDKVNEMLKQDLINGTSTTVETVTDKKTGEITQRTKYGTKVMAQWWLEHGVNRGVTKRPVMTLVYGSKEFGFRDQVLSDTIQPAIDNGKGDMFLNPNQAAGYMAKLIWNAVSGTVVAAVEAMNWLKSAAKLLAAEVKDEKTDTVLRGRCAVHWVTPDGFPVWQEYKKPIQTRLNLMFLGQFRLQPTINTNKDSEIDARKQVSGIAPNFVHSLDGNHLRMTVVWAHEKYGIESFALIHDSFGTIPADAANLFKAVRETFVDTYESCDVLADFYDQIADQLHESQRDKMPALPAKGKLNLRDILKSDFAFA

SEQ ID NO: 1595 - DNA, 2670 bp, synthetic construct
  misc_feature 1..2670: note = Variant of RNA polymerase
  source 1..2670: mol_type = other DNA
atgcaccatcaccatcaccatatgaacacgattaacattgctaagaacgacttctctgacatcgaactggctgctatcccgttcaacactctggctgaccattacggtgagcgtttagctcgcgaacagttggcccttgagcatgagtcttacgagatgggtgaagcacgcttccgcaagatgtttgagcgtcaacttaaagctggtgaggttgcggataacgctgccgccaagcctctcatcactaccctactccctaagatgattgcacgcatcaacgactggtttgaggaagtgaaagctaagcgcggcaagcgcccgacagccttccagttcctgcaagaaatcaagccggaagccgtagcgtacatcaccattaagaccactctggcttgcctaaccagtgcggacaatacaaccgttcaggctgtagcaagcgcaatcggtcgggccattgaggacgaggctcgcttcggtcgtatccgtgaccttgaagctaagcacttcaagaagaacgttgaggaacaactcaacaagcgcgtagggcacgtctacaagaaagcatttatgcaagttgtcgagcacgacatgctctctaagggtctactcggtggcgaggcgtggtcttcgtggcataaggaagactctattcatgtaggagtacgctgcatcgagatgctcattgagtcaaccggaatggttagcttacaccgccaaaatgctggcgtagtgggtgcagactctgagactatcgaactcgcacctgaatacgctgaggctatcgcaacccgtgcaggtgcgctggctggcatctctccgatgttccaaccttgcgtagttcctcctaagccgtggactggcattactggtggtggctattgggctgcggggcgcaaacccctgcagttagtacgtactcgcagtctggcggcgcttcgccgctatgaagaagtgtcgatgccggaggtcatcaaagcagtcaacattgcgcagaatacagcatggcgtattaacaagaaagttctcgacgtagcgaataccatcacccaatggcagcactgtccagtcgcggatgtgcctgcgatggatcgtggcgaaatgccagctcgtccgttggacatcgataccaaccctattgcacttaaagcgtggaagaaagaagcttccgcgttctaccgcaaagacaaagcacgcatgagccgtcgtctgtcgatggagtttatgttatctcaggcgaacaagtttgcgaattatgaggcaatctggtttccgcaaaacatggattggcgtgggcgcgtgtacgctgtcccgatgttcaatcctcagggcaacgatatgacgaaaggcctgctgacctttgcgcaggagaaacccattggtgaagacggcttctattggctcaagattcatggcgcaaatacagctggagtggataaagtaccgtttccacaacgcatcaaatttgttgaggataaccatacgaatattatggaatgcgcgaaagcaccgctggaaaacacttggtgggcggaacaggactcgccgttctgctttctggcgttctgctttgagtatgctggcgtcatcaatagtggtctgtcgtacaactgtagcttgcctctggcatttgatggtagttgctccggcctgcaacatttctcagcgatgttacgcgacgaaattggcggcaaagctgtgaatctcctcccatctgcggaataccaggatatttatcgtatcgtcagcgacaaagttaacgagatgctgaaacaagatctgattaacggtacctctaccaccgtggaaacggtgactgataaaaagacaggcgaaattacccaacgcacgaaatacgggaccaaagttatggcacaatggtggttagaacacggtgtgaatcgtggcgtcacgaaacgcccggttatgactttggtgtatgggagcaaagagtttggattccgcgatcaagtgctgagtgacaccattcaaccggcgatcgataacggcaagggtgacatgtttctgaatccgaatcaggctgctggttacatggcgaaactgatctggaacgcagtgtccgggaccgtagtcgcagcagttgaggcgatgaactggctgaaaagtgcggcgaaattacttgctgctgaagtgaaggatgagaagacggatacagttctgcgtggccgctgcgcagtacattgggtgactcccgacggcttccctgtgtggcaggaatacaagaagcctattcaaacgcgcttgaacctgatgttcctcggtcagttccgcttacagcctaccattaacaccaacaaagatagcgagattgatgcacgcaaacaggtgtctggtatcgctcctaactttgtacacagcctggacggtaaccaccttcgtatgactgtagtgtgggcacacgagaagtacggaatcgaatcttttgcactgattcacgactccttcggtaccattccggctgacgctgcgaacctgttcaaagcagtgcgcgaaactttcgttgacacatatgagtcttgtgatgtactggctgatttctacgaccagattgctgaccagttgcacgagtctcaacgcgacaaaatgccagcacttccggctaaaggtaagttgaacctccgtgacatcttaaaatcggacttcgcgttcgcg

SEQ ID NO: 1596 - protein, 890 aa, synthetic construct
  REGION 1..890: note = Variant of RNA polymerase
MHHHHHHMNTINIAKNDFSDIELAAIPFNTLADHYGERLAREQLALEHESYEMGEARFRKMFERQLKAGEVADNAAAKPLITTLLPKMIARINDWFEEVKAKRGKRPTAFQFLQEIKPEAVAYITIKTTLACLTSADNTTVQAVASAIGRAIEDEARFGRIRDLEAKHFKKNVEEQLNKRVGHVYKKAFMQVVEHDMLSKGLLGGEAWSSWHKEDSIHVGVRCIEMLIESTGMVSLHRQNAGVVGADSETIELAPEYAEAIATRAGALAGISPMFQPCVVPPKPWTGITGGGYWAAGRKPLQLVRTRSLAALRRYEEVSMPEVIKAVNIAQNTAWRINKKVLDVANTITQWQHCPVADVPAMDRGEMPARPLDIDTNPIALKAWKKEASAFYRKDKARMSRRLSMEFMLSQANKFANYEAIWFPQNMDWRGRVYAVPMFNPQGNDMTKGLLTFAQEKPIGEDGFYWLKIHGANTAGVDKVPFPQRIKFVEDNHTNIMECAKAPLENTWWAEQDSPFCFLAFCFEYAGVINSGLSYNCSLPLAFDGSCSGLQHFSAMLRDEIGGKAVNLLPSAEYQDIYRIVSDKVNEMLKQDLINGTSTTVETVTDKKTGEITQRTKYGTKVMAQWWLEHGVNRGVTKRPVMTLVYGSKEFGFRDQVLSDTIQPAIDNGKGDMFLNPNQAAGYMAKLIWNAVSGTVVAAVEAMNWLKSAAKLLAAEVKDEKTDTVLRGRCAVHWVTPDGFPVWQEYKKPIQTRLNLMFLGQFRLQPTINTNKDSEIDARKQVSGIAPNFVHSLDGNHLRMTVVWAHEKYGIESFALIHDSFGTIPADAANLFKAVRETFVDTYESCDVLADFYDQIADQLHESQRDKMPALPAKGKLNLRDILKSDFAFA

SEQ ID NO: 1597 - DNA, 2670 bp, synthetic construct
  misc_feature 1..2670: note = Variant of RNA polymerase
  source 1..2670: mol_type = other DNA
atgcaccatcaccatcaccatatgaacacgattaacattgctaagaacgacttctctgacatcgaactggctgctatcccgttcaacactctggctgaccattacggtgagcgtttagctcgcgaacagttggcccttgagcatgagtcttacgagatgggtgaagcacgcttccgcaagatgtttgagcgtcaacttaaagctggtgaggttgcggataacgctgccgccaagcctctcatcactaccctactccctaagatgattgcacgcatcaacgactggtttgaggaagtgaaagctaagcgcggcaagcgcccgacagccttccagttcctgcaagaaatcaagccggaagccgtagcgtacatcaccattaagaccactctggcttgcctaaccagtgcggacaatacaaccgttcaggctgtagcaagcgcaatcggtcgggccattgaggacgaggctcgcttcggtcgtatccgtgaccttgaagctaagcacttcaagaagaacgttgaggaacaactcaacaagcgcgtagggcacgtctacaagaaagcatttatgcaagttgtcgagcacgacatgctctctaagggtctactcggtggcgaggcgtggtcttcgtggcataaggaagactctattcatgtaggagtacgctgcatcgagatgctcattgagtcaaccggaatggttagcttacaccgccaaaatgctggcgtagtgggtgcagactctgagactatcgaactcgcacctgaatacgctgaggctatcgcaacccgtgcaggtgcgctggctggcatctctccgatgttccaaccttgcgtagttcctcctaagccgtggactggcattactggtggtggctattgggctgcggggcgcaaacccctgcagttagtacgtactcgcagtctggcggcgcttcgccgctatgaagaagtgtcgatgccggaggtcatcaaagcagtcaacattgcgcagaatacagcatggcgtattaacaagaaagttctcgacgtagcgaataccatcacccaatggaagcactgtccagtcgcggatgtgcctgcgatggatcgtggcgaaatgccagctcgtccgttggacatcgataccaacgagattgcacttaaagcgtggaagaaagaagcttccgcgttctaccgcaaagacaaagcacgcatgagccgtcgtctgtcgatggagtttatgttatctcaggcgaacaagtttgcgaattatgaggcaatctggtttccgcaaaacatggattggcgtgggcgcgtgtacgctgtcccgatgttcaatcctcagggcaacgatatgacgaaaggcctgctgacctttgcgcaggagaaacccattggtgaagacggcttctattggctcaagattcatggcgcaaatacagctggagtggataaagtaccgtttccacaacgcatcaaatttgttgaggataaccatacgaatattatggaatgcgcgaaagcaccgctggaaaacacttggtgggcggaacaggactcgccgttctgctttctggcgttctgctttgagtatgctggcgtcatcaatagtggtctgtcgtacaactgtagcttgcctctggcatttgatggtagttgctccggcctgcaacatttctcagcgatgttacgcgacgaaattggcggcaaagctgtgaatctcctcccatctgcggaataccaggatatttatcgtatcgtcagcgacaaagttaacgagatgctgaaacaagatctgattaacggtacctctaccaccgtggaaacggtgactgataaaaagacaggcgaaattacccaacgcacgaaatacgggaccaaagttatggcacagtggtggttagaacacggtgtgaatcgtggcgtcacgaaacgcccggttatgactttggtgtatgggagcaaagagtttggattccgcgatcaagtgctgagtgacaccattcaaccggcgatcgataacggcaagggtgacatgtttctgaatccgaatcaggctgctggttacatggcgaaactgatctggaacgcagtgtccgggaccgtagtcgcagcagttgaggcgatgaactggctgaaaagtgcggcgaaattacttgctgctgaagtgaaggatgagaagacggatacagttctgcgtggccgctgcgcagtacattgggtgactcccgacggcttccctgtgtggcaggaatacaagaagcctattcaaacgcgcttgaacctgatgttcctcggtcagttccgcttacagcctaccattaacaccaacaaagatagcgagattgatgcacgcaaacaggtgtctggtatcgctcctaactttgtacacagcctggacggtaaccaccttcgtatgactgtagtgtgggcacacgagaagtacggaatcgaatcttttgcactgattcacgactccttcggtaccattccggctgacgctgcgaacctgttcaaagcagtgcgcgaaactttcgttgacacatatgagtcttgtgatgtactggctgatttctacgaccagattgctgaccagttgcacgagtctcaacgcgacaaaatgccagcacttccggctaaaggtaagttgaacctccgtgacatcttaaaatcggacttcgcgttcgcg

SEQ ID NO: 1598 - protein, 890 aa, synthetic construct
  REGION 1..890: note = Variant of RNA polymerase
MHHHHHHMNTINIAKNDFSDIELAAIPFNTLADHYGERLAREQLALEHESYEMGEARFRKMFERQLKAGEVADNAAAKPLITTLLPKMIARINDWFEEVKAKRGKRPTAFQFLQEIKPEAVAYITIKTTLACLTSADNTTVQAVASAIGRAIEDEARFGRIRDLEAKHFKKNVEEQLNKRVGHVYKKAFMQVVEHDMLSKGLLGGEAWSSWHKEDSIHVGVRCIEMLIESTGMVSLHRQNAGVVGADSETIELAPEYAEAIATRAGALAGISPMFQPCVVPPKPWTGITGGGYWAAGRKPLQLVRTRSLAALRRYEEVSMPEVIKAVNIAQNTAWRINKKVLDVANTITQWKHCPVADVPAMDRGEMPARPLDIDTNEIALKAWKKEASAFYRKDKARMSRRLSMEFMLSQANKFANYEAIWFPQNMDWRGRVYAVPMFNPQGNDMTKGLLTFAQEKPIGEDGFYWLKIHGANTAGVDKVPFPQRIKFVEDNHTNIMECAKAPLENTWWAEQDSPFCFLAFCFEYAGVINSGLSYNCSLPLAFDGSCSGLQHFSAMLRDEIGGKAVNLLPSAEYQDIYRIVSDKVNEMLKQDLINGTSTTVETVTDKKTGEITQRTKYGTKVMAQWWLEHGVNRGVTKRPVMTLVYGSKEFGFRDQVLSDTIQPAIDNGKGDMFLNPNQAAGYMAKLIWNAVSGTVVAAVEAMNWLKSAAKLLAAEVKDEKTDTVLRGRCAVHWVTPDGFPVWQEYKKPIQTRLNLMFLGQFRLQPTINTNKDSEIDARKQVSGIAPNFVHSLDGNHLRMTVVWAHEKYGIESFALIHDSFGTIPADAANLFKAVRETFVDTYESCDVLADFYDQIADQLHESQRDKMPALPAKGKLNLRDILKSDFAFA

SEQ ID NO: 1599 - DNA, 2670 bp, synthetic construct
  misc_feature 1..2670: note = Variant of RNA polymerase
  source 1..2670: mol_type = other DNA
atgcaccatcaccatcaccatatgaacacgattaacattgctaagaacgacttctctgacatcgaactggctgctatcccgttcaacactctggctgaccattacggtgagcgtttagctcgcgaacagttggcccttgagcatgagtcttacgagatgggtgaagcacgcttccgcaagatgtttgagcgtcaacttaaagctggtgaggttgcggataacgctgccgccaagcctctcatcactaccctactccctaagatgattgcacgcatcaacgactggtttgaggaagtgaaagctaagcgcggcaagcgcccgacagccttccagttcctgcaagaaatcaagccggaagccgtagcgtacatcaccattaagaccactctggcttgcctaaccagtgcggacaatacaaccgttcaggctgtagcaagcgcaatcggtcgggccattgaggacgaggctcgcttcggtcgtatccgtgaccttgaagctaagcacttcaagaagaacgttgaggaacaactcaacaagcgcgtagggcacgtctacaagaaagcatttatgcaagttgtcgagcacgacatgctctctaagggtctactcggtggcgaggcgtggtcttcgtggcataaggaagactctattcatgtaggagtacgctgcatcgagatgctcattgagtcaaccggaatggttagcttacaccgccaaaatgctggcgtagtgggtgcagactctgagactatcgaactcgcacctgaatacgctgaggctatcgcaacccgtgcaggtgcgctggctggcatctctccgatgttccaaccttgcgtagttcctcctaagccgtggactggcattactggtggtggctattgggctgcggggcgcaaacccctgcagttagtacgtactcgcagtctgcatgcgcttcgccgctatgaagaagtgtcgatgccggaggtcatcaaagcagtcaacattgcgcagaatacagcatggcgtattaacaagaaagttctcgacgtagcgaataccatcacccaatggcagcactgtccagtcgcggatgtgcctgcgatggatcgtggcgaaatgccagctcgtccgttggacatcgataccaacgagattgcacttaaagcgtggaagaaagaagcttccgcgttctaccgcaaagacaaagcacgcatgagccgtcgtctgtcgatggagtttatgttatctcaggcgaacaagtttgcgaattatgaggcaatctggtttccgcaaaacatggattggcgtgggcgcgtgtacgctgtcccgatgttcaatcctcagggcaacgatatgacgaaaggcctgctgacctttgcgcaggagaaacccattggtgaagacggcttctattggctcaagattcatggcgcaaatacagctggagtggataaagtaccgtttccacaacgcatcaaatttgttgaggataaccatacgaatattatggaatgcgcgaaagcaccgctggaaaacacttggtgggcggaacaggactcgccgttctgctttctggcgttctgctttgagtatgctggcgtcatcaatagtggtctgtcgtacaactgtagcttgcctctggcatttgatggtagttgctccggcctgcaacatttctcagcgatgttacgcgacgaaattggcggcaaagctgtgaatctcctcccatctgcggaataccaggatatttatcgtatcgtcagcgacaaagttaacgagatgctgaaacaagatctgattaacggtacctctaccaccgtggaaacggtgactgataaaaagacaggcgaaattacccaacgcacgaaatacgggaccaaagttatggcacagtggtggttagaacacggtgtgaatcgtggcgtcacgaaacgcccggttatgactttggtgtatgggagcaaagagtttggattccgcgatcaagtgctgagtgacaccattcaaccggcgatcgataacggcaagggtgacatgtttctgaatccgaatcaggctgctggttacatggcgaaactgatctggaacgcagtgtccgggaccgtagtcgcagcagttgaggcgatgaactggctgaaaagtgcggcgaaattacttgctgctgaagtgaaggatgagaagacggatacagttctgcgtggccgctgcgcagtacattgggtgactcccgacggcttccctgtgtggcaggaatacaagaagcctattcaaacgcgcttgaacctgatgttcctcggtcagttccgcttacagcctaccattaacaccaacaaagatagcgagattgatgcacgcaaacaggtgtctggtatcgctcctaactttgtacacagcctggacggtaaccaccttcgtatgactgtagtgtgggcacacgagaagtacggaatcgaatcttttgcactgattcacgactccttcggtaccattccggctgacgctgcgaacctgttcaaagcagtgcgcgaaactttcgttgacacatatgagtcttgtgatgtactggctgatttctacgaccagattgctgaccagttgcacgagtctcaacgcgacaaaatgccagcacttccggctaaaggtaagttgaacctccgtgacatcttaaaatcggacttcgcgttcgcg

SEQ ID NO: 1600 - protein, 890 aa, synthetic construct
  REGION 1..890: note = Variant of RNA polymerase
MHHHHHHMNTINIAKNDFSDIELAAIPFNTLADHYGERLAREQLALEHESYEMGEARFRKMFERQLKAGEVADNAAAKPLITTLLPKMIARINDWFEEVKAKRGKRPTAFQFLQEIKPEAVAYITIKTTLACLTSADNTTVQAVASAIGRAIEDEARFGRIRDLEAKHFKKNVEEQLNKRVGHVYKKAFMQVVEHDMLSKGLLGGEAWSSWHKEDSIHVGVRCIEMLIESTGMVSLHRQNAGVVGADSETIELAPEYAEAIATRAGALAGISPMFQPCVVPPKPWTGITGGGYWAAGRKPLQLVRTRSLHALRRYEEVSMPEVIKAVNIAQNTAWRINKKVLDVANTITQWQHCPVADVPAMDRGEMPARPLDIDTNEIALKAWKKEASAFYRKDKARMSRRLSMEFMLSQANKFANYEAIWFPQNMDWRGRVYAVPMFNPQGNDMTKGLLTFAQEKPIGEDGFYWLKIHGANTAGVDKVPFPQRIKFVEDNHTNIMECAKAPLENTWWAEQDSPFCFLAFCFEYAGVINSGLSYNCSLPLAFDGSCSGLQHFSAMLRDEIGGKAVNLLPSAEYQDIYRIVSDKVNEMLKQDLINGTSTTVETVTDKKTGEITQRTKYGTKVMAQWWLEHGVNRGVTKRPVMTLVYGSKEFGFRDQVLSDTIQPAIDNGKGDMFLNPNQAAGYMAKLIWNAVSGTVVAAVEAMNWLKSAAKLLAAEVKDEKTDTVLRGRCAVHWVTPDGFPVWQEYKKPIQTRLNLMFLGQFRLQPTINTNKDSEIDARKQVSGIAPNFVHSLDGNHLRMTVVWAHEKYGIESFALIHDSFGTIPADAANLFKAVRETFVDTYESCDVLADFYDQIADQLHESQRDKMPALPAKGKLNLRDILKSDFAFA

SEQ ID NO: 1601 - DNA, 2670 bp, synthetic construct
  misc_feature 1..2670: note = Variant of RNA polymerase
  source 1..2670: mol_type = other DNA
atgcaccatcaccatcaccatatgaacacgattaacattgctaagaacgacttctctgacatcgaactggctgctatcccgttcaacactctggctgaccattacggtgagcgtttagctcgcgaacagttggcccttgagcatgagtcttacgagatgggtgaagcacgcttccgcaagatgtttgagcgtcaacttaaagctggtgaggttgcggataacgctgccgccaagcctctcatcactaccctactccctaagatgattgcacgcatcaacgactggtttgaggaagtgaaagctaagcgcggcaagcgcccgacagccttccagttcctgcaagaaatcaagccggaagccgtagcgtacatcaccattaagaccactctggcttgcctaaccagtgcggacaatacaaccgttcaggctgtagcaagcgcaatcggtcgggccattgaggacgaggctcgcttcggtcgtatccgtgaccttgaagctaagcacttcaagaagaacgttgaggaacaactcaacaagcgcgtagggcacgtctacaagaaagcatttatgcaagttgtcgagcacgacatgctctctaagggtctactcggtggcgaggcgtggtcttcgtggcataaggaagactctattcatgtaggagtacgctgcatcgagatgctcattgagtcaaccggaatggttagcttacaccgccaaaatgctggcgtagtgggtgcagactctgagactatcgaactcgcacctgaatacgctgaggctatcgcaacccgtgcaggtgcgctggctggcatctctccgatgttccaaccttgcgtagttcctcctaagccgtggactggcattactggtggtggctattgggctgcggggcgcaaacccctgcagttagtacgtactcgcagtctggcggcgcttcgccgctatgaagaagtgtcgatgccggaggtcatcaaagcagtcaacattgcgcagaatacagcatggcgtattaacaagaaagttctcgacgtagcgaataccatcacccaatggcagcactgtccagtcgcggatgtgcctgcgatggatcgtggcgaaatgccagctaagccgttggacatcgataccaacgagattgcacttaaagcgtggaagaaagaagcttccgcgttctaccgcaaagacaaagcacgcatgagccgtcgtctgtcgatggagtttatgttatctcaggcgaacaagtttgcgaattatgaggcaatctggtttccgcaaaacatggattggcgtgggcgcgtgtacgctgtcccgatgttcaatcctcagggcaacgatatgacgaaaggcctgctgacctttgcgcaggagaaacccattggtgaagacggcttctattggctcaagattcatggcgcaaatacagctggagtggataaagtaccgtttccacaacgcatcaaatttgttgaggataaccatacgaatattatggaatgcgcgaaagcaccgctggaaaacacttggtgggcggaacaggactcgccgttctgctttctggcgttctgctttgagtatgctggcgtcatcaatagtggtctgtcgtacaactgtagcttgcctctggcatttgatggtagttgctccggcctgcaacatttctcagcgatgttacgcgacgaaattggcggcaaagctgtgaatctcctcccatctgcggaataccaggatatttatcgtatcgtcagcgacaaagttaacgagatgctgaaacaagatctgattaacggtacctctaccaccgtggaaacggtgactgataaaaagacaggcgaaattacccaacgcacgaaatacgggaccaaagttatggcacagtggtggttagaacacggtgtgaatcgtggcgtcacgaaacgcccggttatgactttggtgtatgggagcaaagagtttggattccgcgatcaagtgctgagtgacaccattcaaccggcgatcgataacggcaagggtgacatgtttctgaatccgaatcaggctgctggttacatggcgaaactgatctggaactcggtgtccgggaccgtagtcgcagcagttgaggcgatgaactggctgaaaagtgcggcgaaattacttgctgctgaagtgaaggatgagaagacggatacagttctgcgtggccgctgcgcagtacattgggtgactcccgacggcttccctgtgtggcaggaatacaagaagcctattcaaacgcgcttgaacctgatgttcctcggtcagttccgcttacagcctaccattaacatcaacaaagatagcgagattgatgcacgcaaacaggtgtctggtatcgctcctaactttgtacacagcctggacggtaaccaccttcgtatgactgtagtgtgggcacacgagaagtacggaatcgaatcttttgcactgattcacgactccttcggtaccattccggctgacgctgcgaacctgttcaaagcagtgcgcgaaactttcgttgacacatatgagtcttgtgatgtactggctgatttctacgaccagattgctgaccagttgcacgagtctcaacgcgacaaaatgccagcacttccggctaaaggtaagttgaacctccgtgacatcttaaaatcggacttcgcgttcgcg

SEQ ID NO: 1602 - protein, 890 aa, synthetic construct
  REGION 1..890: note = Variant of RNA polymerase
MHHHHHHMNTINIAKNDFSDIELAAIPFNTLADHYGERLAREQLALEHESYEMGEARFRKMFERQLKAGEVADNAAAKPLITTLLPKMIARINDWFEEVKAKRGKRPTAFQFLQEIKPEAVAYITIKTTLACLTSADNTTVQAVASAIGRAIEDEARFGRIRDLEAKHFKKNVEEQLNKRVGHVYKKAFMQVVEHDMLSKGLLGGEAWSSWHKEDSIHVGVRCIEMLIESTGMVSLHRQNAGVVGADSETIELAPEYAEAIATRAGALAGISPMFQPCVVPPKPWTGITGGGYWAAGRKPLQLVRTRSLAALRRYEEVSMPEVIKAVNIAQNTAWRINKKVLDVANTITQWQHCPVADVPAMDRGEMPAKPLDIDTNEIALKAWKKEASAFYRKDKARMSRRLSMEFMLSQANKFANYEAIWFPQNMDWRGRVYAVPMFNPQGNDMTKGLLTFAQEKPIGEDGFYWLKIHGANTAGVDKVPFPQRIKFVEDNHTNIMECAKAPLENTWWAEQDSPFCFLAFCFEYAGVINSGLSYNCSLPLAFDGSCSGLQHFSAMLRDEIGGKAVNLLPSAEYQDIYRIVSDKVNEMLKQDLINGTSTTVETVTDKKTGEITQRTKYGTKVMAQWWLEHGVNRGVTKRPVMTLVYGSKEFGFRDQVLSDTIQPAIDNGKGDMFLNPNQAAGYMAKLIWNSVSGTVVAAVEAMNWLKSAAKLLAAEVKDEKTDTVLRGRCAVHWVTPDGFPVWQEYKKPIQTRLNLMFLGQFRLQPTININKDSEIDARKQVSGIAPNFVHSLDGNHLRMTVVWAHEKYGIESFALIHDSFGTIPADAANLFKAVRETFVDTYESCDVLADFYDQIADQLHESQRDKMPALPAKGKLNLRDILKSDFAFA

SEQ ID NO: 1603 - DNA, 2670 bp, synthetic construct
  misc_feature 1..2670: note = Variant of RNA polymerase
  source 1..2670: mol_type = other DNA
atgcaccatcaccatcaccatatgaacacgattaacattgctaagaacgacttctctgacatcgaactggctgctatcccgttcaacactctggctgaccattacggtgagcgtttagctcgcgaacagttggcccttgagcatgagtcttacgagatgggtgaagcacgcttccgcaagatgtttgagcgtcaacttaaagctggtgaggttgcggataacgctgccgccaagcctctcatcactaccctactccctaagatgattgcacgcatcaacgactggtttgaggaagtgaaagctaagcgcggcaagcgcccgacagccttccagttcctgcaagaaatcaagccggaagccgtagcgtacatcaccattaagaccactctggcttgcctaaccagtgcggacaatacaaccgttcaggctgtagcaagcgcaatcggtcgggccattgaggacgaggctcgcttcggtcgtatccgtgaccttgaagctaagcacttcaagaagaacgttgaggaacaactcaacaagcgcgtagggcacgtctacaagaaagcatttatgcaagttgtcgagcacgacatgctctctaagggtctactcggtggcgaggcgtggtcttcgtggcataaggaagactctattcatgtaggagtacgctgcatcgagatgctcattgagtcaaccggaatggttagcttacaccgccaaaatgctggcgtagtgggtgcagactctgagactatcgaactcgcacctgaatacgctgaggctatcgcaacccgtgcaggtgcgctggctggcatctctccgatgttccaaccttgcgtagttcctcctaagccgtggactggcattactggtggtggctattgggctgcggggcgcaaacccctgcagttagtacgtactcgcagtctgaaggcgcttcgccgctatgaagaagtgtcgatgccggaggtcatcaaagcagtcaacattgcgcagaatacagcatggcgtattaacaagaaagttctcgacgtagcgaataccatcacccaatggcagcactgtccagtccgtgatattcctgcgatggatcgtggcgaaatgccagctcgtccgttggacatcgataccaacgagattgcacttaaagcgtggaagaaagaagcttccgcgttctaccgcaaagacaaagcacgcatgagccgtcgtctgtcgatggagtttatgttatctcaggcgaacaagtttgcgaattatgaggcaatctggtttccgcaaaacatggattggcgtgggcgcgtgtacgctgtcccgatgttcaatcctcagggcaacgatatgacgaaaggcctgctgacctttgcgcaggagaaacccattggtgaagacggcttctattggctcaagattcatggcgcaaatacagctggagtggataaagtaccgtttccacaacgcatcaaatttattgaggataaccatacgaatattatggaatgcgcgaaagcaccgctggaaaacacttggtgggcggaacaggactcgccgttctgctttctggcgttctgctttgagtatgctggcgtcatcaatagtggtctgtcgtacaactgtagcttgcctctggcatttgatggtagttgctccggcctgcaacatttctcagcgatgttacgcgacgaaattggcggcaaagctgtgaatctcctcccatctgcggaataccaggatatttatcgtatcgtcagcgacaaagttaacgagatgctgaaacaagatctgattaacggtacctctaccaccgtggaaacggtgactgataaaaagacaggcgaaattacccaacgcacgaaatacgggaccaaagttatggcacagtggtggttagaacacggtgtgaatcgtggcgtcacgaaacgcccggttatgactttggtgtatgggagcaaagagtttggattccgcgatcaagtgctgagtgacaccattcaaccggcgatcgataacggcaagggtctgatgtttctgaatccgaatcaggctgctggttacatggcgaaactgatctggaacgcagtgtccgggaccgtagtcgcagcagttgaggcgatgaactggctgaaaagtgcggcgaaattacttgctgctgaagtgaaggatgagaagacggatacagttctgcgtggccgctgcgcagtacattgggtgactcccgacggcttccctgtgtggcaggaatacaagaagcctattcaaacgcgcttgaacctgatgttcctcggtcagttccgcttacagcctaccattaacaccaacaaagatagcgagattgatgcacgcaaacaggtgtctggtatcgctcctaactttgtacacagcctggacggtaaccaccttcgtatgactgtagtgtgggcacacgagaagtacggaatcgaatcttttgcactgattcacgactccttcggtaccattccggctgacgctgcgaacctgttcaaagcagtgcgcgaaactttcgttgacacatatgagtcttgtgatgtactggctgatttctacgaccagattgctgaccagttgcacgagtctcaacgcgacaaaatgccagcacttccggctaaaggtaagttgaacctccgtgacatcttaaaatcggacttcgcgttcgcg

SEQ ID NO: 1604 - protein, 890 aa, synthetic construct
  REGION 1..890: note = Variant of RNA polymerase
MHHHHHHMNTINIAKNDFSDIELAAIPFNTLADHYGERLAREQLALEHESYEMGEARFRKMFERQLKAGEVADNAAAKPLITTLLPKMIARINDWFEEVKAKRGKRPTAFQFLQEIKPEAVAYITIKTTLACLTSADNTTVQAVASAIGRAIEDEARFGRIRDLEAKHFKKNVEEQLNKRVGHVYKKAFMQVVEHDMLSKGLLGGEAWSSWHKEDSIHVGVRCIEMLIESTGMVSLHRQNAGVVGADSETIELAPEYAEAIATRAGALAGISPMFQPCVVPPKPWTGITGGGYWAAGRKPLQLVRTRSLKALRRYEEVSMPEVIKAVNIAQNTAWRINKKVLDVANTITQWQHCPVRDIPAMDRGEMPARPLDIDTNEIALKAWKKEASAFYRKDKARMSRRLSMEFMLSQANKFANYEAIWFPQNMDWRGRVYAVPMFNPQGNDMTKGLLTFAQEKPIGEDGFYWLKIHGANTAGVDKVPFPQRIKFIEDNHTNIMECAKAPLENTWWAEQDSPFCFLAFCFEYAGVINSGLSYNCSLPLAFDGSCSGLQHFSAMLRDEIGGKAVNLLPSAEYQDIYRIVSDKVNEMLKQDLINGTSTTVETVTDKKTGEITQRTKYGTKVMAQWWLEHGVNRGVTKRPVMTLVYGSKEFGFRDQVLSDTIQPAIDNGKGLMFLNPNQAAGYMAKLIWNAVSGTVVAAVEAMNWLKSAAKLLAAEVKDEKTDTVLRGRCAVHWVTPDGFPVWQEYKKPIQTRLNLMFLGQFRLQPTINTNKDSEIDARKQVSGIAPNFVHSLDGNHLRMTVVWAHEKYGIESFALIHDSFGTIPADAANLFKAVRETFVDTYESCDVLADFYDQIADQLHESQRDKMPALPAKGKLNLRDILKSDFAFA

SEQ ID NO: 1605 - DNA, 2670 bp, synthetic construct
  misc_feature 1..2670: note = Variant of RNA polymerase
  source 1..2670: mol_type = other DNA
atgcaccatcaccatcaccatatgaacacgattaacattgctaagaacgacttctctgacatcgaactggctgctatcccgttcaacactctggctgaccattacggtgagcgtttagctcgcgaacagttggcccttgagcatgagtcttacgagatgggtgaagcacgcttccgcaagatgtttgagcgtcaacttaaagctggtgaggttgcggataacgctgccgccaagcctctcatcactaccctactccctaagatgattgcacgcatcaacgactggtttgaggaagtgaaagctaagcgcggcaagcgcccgacagccttccagttcctgcaagaaatcaagccggaagccgtagcgtacatcaccattaagaccactctggcttgcctaaccagtgcggacaatacaaccgttcaggctgtagcaagcgcaatcggtcgggccattgaggacgaggctcgcttcggtcgtatccgtgaccttgaagctaagcacttcaagaagaacgttgaggaacaactcaacaagcgcgtagggcacgtctacaagaaagcatttatgcaagttgtcgagcacgacatgctctctaagggtctactcggtggcgaggcgtggtcttcgtggcataaggaagactctattcatgtaggagtacgctgcatcgagatgctcattgagtcaaccggaatggttagcttacaccgccaaaatgctggcgtagtgggtgcagactctgagactatcgaactcgcacctgaatacgctgaggctatcgcaacccgtgcaggtgcgctggctggcatctctccgatgttccaaccttgcgtagttcctcctaagccgtggactggcattactggtggtggctattgggctgcggggcgcaaacccctgcagttagtacgtactcgcagtctggcggcgcttcgccgctatgaagaagtgtcgatgccggaggtcatcaaagcagtcaacattgcgcagaatacagcatggcgtattaacaagaaagttctcgacgtagcgaataccatcacccaatggcagcactgtccagtccgtgatattcctgcgatggatcgtggcgaaatgccagctcgtccgttggacatcgataccaacgagattgcacttaaagcgtggaagaaagaagcttccgcgttctaccgcaaagacaaagcacgcatgagccgtcgtctgtcgatggagtttatgttatctcaggcgaacaagtttgcgaattatgaggcaatctggtttccgcaaaacatggattggcgtgggcgcgtgtacgctgtcccgatgttcaatcctcagggcaacgatatgacgaaaggcctgctgacctttgcgcaggagaaacccattggtgaagacggcttctattggctcaagattcatggcgcaaatacagctggagtggataaagtaccgtttccacaacgcatcaaatttgttgaggataaccatacgaatattatggaatgcgcgaaagcaccgctggaaaacacttggtgggcggaacaggactcgccgttctgctttctggcgttctgctttgagtatgctggcgtcatcaatagtggtctgtcgtacaactgtagcttgcctctggcatttgatggtagttgctccggcctgcaacatttctcagcgatgttacgcgacgaaattggcggcaaagctgtgaatctcctcccatctgcggaataccaggatatttatggtatcgtcagcgacaaagttaacgagatgctgaaacaagatctgattaacggtacctctaccaccgtggaaacggtgactgataaaaagacaggcgaaattacccaacgcacgaaatacgggaccaaagttatggcacaatggtggttagaacacggtgtgaatcgtggcgtcacgaaacgcccggttatgactttggtgtatgggagcaaagagtttggattccgcgatcaagtgctgagtgacaccattcaaccggcgatcgataacggcaagggtgacatgtttctgaatccgaatcaggctgctggttacatggcgaaactgatctggaactcggtgtccgggaccgtagtcgcagcagttgaggcgatgaactggctgaaaagtgcggcgaaattacttgctgctgaagtgaaggatgagaagacggatacagttctgcgtggccgctgcgcagtacattgggtgactcccgacggcttccctgtgtggcaggaatacaagaagcctattcaaacgcgcttgaacctgatgttcctcggtcagttccgcttacagcctaccattaacaccaacaaagatagcgagattgatgcacgcaaacaggtgtctggtatcgctcctaactttgtacacagcctggacggtaaccaccttcgtatgactgtagtgtgggcacacgagaagtacggaatcgaatcttttgcactgattcacgactccttcggtaccattccggctgacgctgcgaacctgttcaaagcagtgcgcgaaactttcgttgacacatatgagtcttgtgatgtactggctgatttctacgaccagattgctgaccagttgcacgagtctcaacgcgacaaaatgccagcacttccggctaaaggtaagttgaacctccgtgacatcttaaaatcggacttcgcgttcgcg

SEQ ID NO: 1606 - protein, 890 aa, synthetic construct
  REGION 1..890: note = Variant of RNA polymerase
MHHHHHHMNTINIAKNDFSDIELAAIPFNTLADHYGERLAREQLALEHESYEMGEARFRKMFERQLKAGEVADNAAAKPLITTLLPKMIARINDWFEEVKAKRGKRPTAFQFLQEIKPEAVAYITIKTTLACLTSADNTTVQAVASAIGRAIEDEARFGRIRDLEAKHFKKNVEEQLNKRVGHVYKKAFMQVVEHDMLSKGLLGGEAWSSWHKEDSIHVGVRCIEMLIESTGMVSLHRQNAGVVGADSETIELAPEYAEAIATRAGALAGISPMFQPCVVPPKPWTGITGGGYWAAGRKPLQLVRTRSLAALRRYEEVSMPEVIKAVNIAQNTAWRINKKVLDVANTITQWQHCPVRDIPAMDRGEMPARPLDIDTNEIALKAWKKEASAFYRKDKARMSRRLSMEFMLSQANKFANYEAIWFPQNMDWRGRVYAVPMFNPQGNDMTKGLLTFAQEKPIGEDGFYWLKIHGANTAGVDKVPFPQRIKFVEDNHTNIMECAKAPLENTWWAEQDSPFCFLAFCFEYAGVINSGLSYNCSLPLAFDGSCSGLQHFSAMLRDEIGGKAVNLLPSAEYQDIYGIVSDKVNEMLKQDLINGTSTTVETVTDKKTGEITQRTKYGTKVMAQWWLEHGVNRGVTKRPVMTLVYGSKEFGFRDQVLSDTIQPAIDNGKGDMFLNPNQAAGYMAKLIWNSVSGTVVAAVEAMNWLKSAAKLLAAEVKDEKTDTVLRGRCAVHWVTPDGFPVWQEYKKPIQTRLNLMFLGQFRLQPTINTNKDSEIDARKQVSGIAPNFVHSLDGNHLRMTVVWAHEKYGIESFALIHDSFGTIPADAANLFKAVRETFVDTYESCDVLADFYDQIADQLHESQRDKMPALPAKGKLNLRDILKSDFAFA

SEQ ID NO: 1607 - DNA, 2670 bp, synthetic construct
  misc_feature 1..2670: note = Variant of RNA polymerase
  source 1..2670: mol_type = other DNA
atgcaccatcaccatcaccatatgaacacgattaacattgctaagaacgacttctctgacatcgaactggctgctatcccgttcaacactctggctgaccattacggtgagcgtttagctcgcgaacagttggcccttgagcatgagtcttacgagatgggtgaagcacgcttccgcaagatgtttgagcgtcaacttaaagctggtgaggttgcggataacgctgccgccaagcctctcatcactaccctactccctaagatgattgcacgcatcaacgactggtttgaggaagtgaaagctaagcgcggcaagcgcccgacagccttccagttcctgcaagaaatcaagccggaagccgtagcgtacatcaccattaagaccactctggcttgcctaaccagtgcggacaatacaaccgttcaggctgtagcaagcgcaatcggtcgggccattgaggacgaggctcgcttcggtcgtatccgtgaccttgaagctaagcacttcaagaagaacgttgaggaacaactcaacaagcgcgtagggcacgtctacaagaaagcatttatgcaagttgtcgagcacgacatgctctctaagggtctactcggtggcgaggcgtggtcttcgtggcataaggaagactctattcatgtaggagtacgctgcatcgagatgctcattgagtcaaccggaatggttagcttacaccgccaaaatgctggcgtagtgggtgcagactctgagactatcgaactcgcacctgaatacgctgaggctatcgcaacccgtgcaggtgcgctggctggcatctctccgatgttccaaccttgcgtagttcctcctaagccgtggactggcattactggtggtggctattgggctgcggggcgcaaacccctgcagttagtacgtactcgccctctggcggcgcttcgccgctatgaagaagtgtcgatgccggaggtcatcaaagcagtcaacattgcgcagaatacagcatggcgtattaacaagaaagttctcgacgtagcgaataccatcacccaatggcagcactgtccagtcgcggatgtgcctgcgatggatcgtggcgaaatgccagctcgtccgttggacatcgataccaacgagattgcacttaaagcgtggaagaaagaagcttccgcgttctaccgcaaagacaaagcacgcatgagccgtcgtctgtcgatggagtttatgttatctcaggcgaacaagtttgcgaattatgaggcaatctggtttccgcaaaacatggattggcgtgggcgcgtgtacgctgtcccgatgttcaatcctcagggcaacgatatgacgaaaggcctgctgacctttgcgcaggagaaacccattggtgaagacggcttctattggctcaagattcatggcgcaaatacagctggagtggataaagtaccgtttccacaacgcatcaaatttgttgaggataaccatacgaatattatggaatgcgcgaaagcaccgctggaaaacacttggtgggcggaacaggactcgccgttctgctttctggcgttctgctttgagtatgctggcgtcatcaatagtggtctgtcgtacaactgtagcttgcctctggcatttgatggtagttgctccggcctgcaacatttctcagcgatgttacgcgacgaaattggcggcaaagctgtgaatctcctcccatctgcggaataccaggatatttatcgtatcgtcagcgacaaagttaacgagatgctgaaacaagatctgattaacggtacctctaccaccgtggaaacggtgactgataaaaagacaggcgaaattacccaacgcacgaaatacgggaccaaagttatggcacagtggtggttagaacacggtgtgaatcgtggcgtcacgaaacgcccggttatgactttggtgtatgggagcaaagagtttggattccgcgatcaagtgctgagtgacaccattcaaccggcgatcgataacggcaagggtgacatgtttctgaatccgaatcaggctgctggttacatggcgaaactgatctggaacgcagtgtccgggaccgtagtcgcagcagttgaggcgatgaactggctgaaaagtgcggcgaaattacttgctgctgaagtgaaggatgagaagacggatacagttctgcgtggccgctgcgcagtacattgggtgactcccgacggcttccctgtgtggcaggaatacaagaagcctattcaaacgcgcttgaacctgatgttcctcggtcagttccgcttacagcctaccattaacaccaacaaagatagcgagattgatgcacgcaaacaggtgtctggtatcgctcctaactttgtacacagcctggacggtaaccaccttcgtatgactgtagtgtgggcacacgagaagtacggaatcgaatcttttgcactgattcacgactccttcggtaccattccggctgacgctgcgaacctgttcaaagcagtgcgcgaaactttcgttgacacatatgagtcttgtgatgtactggctgatttctacgaccagattgctgaccagttgcacgagtctcaacgcgacaaaatgccagcacttccggctaaaggtaagttgaacctccgtgacatcttaaaatcggacttcgcgttcgcg

SEQ ID NO: 1608 - protein, 890 aa, synthetic construct
  REGION 1..890: note = Variant of RNA polymerase
MHHHHHHMNTINIAKNDFSDIELAAIPFNTLADHYGERLAREQLALEHESYEMGEARFRKMFERQLKAGEVADNAAAKPLITTLLPKMIARINDWFEEVKAKRGKRPTAFQFLQEIKPEAVAYITIKTTLACLTSADNTTVQAVASAIGRAIEDEARFGRIRDLEAKHFKKNVEEQLNKRVGHVYKKAFMQVVEHDMLSKGLLGGEAWSSWHKEDSIHVGVRCIEMLIESTGMVSLHRQNAGVVGADSETIELAPEYAEAIATRAGALAGISPMFQPCVVPPKPWTGITGGGYWAAGRKPLQLVRTRPLAALRRYEEVSMPEVIKAVNIAQNTAWRINKKVLDVANTITQWQHCPVADVPAMDRGEMPARPLDIDTNEIALKAWKKEASAFYRKDKARMSRRLSMEFMLSQANKFANYEAIWFPQNMDWRGRVYAVPMFNPQGNDMTKGLLTFAQEKPIGEDGFYWLKIHGANTAGVDKVPFPQRIKFVEDNHTNIMECAKAPLENTWWAEQDSPFCFLAFCFEYAGVINSGLSYNCSLPLAFDGSCSGLQHFSAMLRDEIGGKAVNLLPSAEYQDIYRIVSDKVNEMLKQDLINGTSTTVETVTDKKTGEITQRTKYGTKVMAQWWLEHGVNRGVTKRPVMTLVYGSKEFGFRDQVLSDTIQPAIDNGKGDMFLNPNQAAGYMAKLIWNAVSGTVVAAVEAMNWLKSAAKLLAAEVKDEKTDTVLRGRCAVHWVTPDGFPVWQEYKKPIQTRLNLMFLGQFRLQPTINTNKDSEIDARKQVSGIAPNFVHSLDGNHLRMTVVWAHEKYGIESFALIHDSFGTIPADAANLFKAVRETFVDTYESCDVLADFYDQIADQLHESQRDKMPALPAKGKLNLRDILKSDFAFA

SEQ ID NO: 1609 - DNA, 2670 bp, synthetic construct
  misc_feature 1..2670: note = Variant of RNA polymerase
  source 1..2670: mol_type = other DNA
atgcaccatcaccatcaccatatgaacacgattaacattgctaagaacgacttctctgacatcgaactggctgctatcccgttcaacactctggctgaccattacggtgagcgtttagctcgcgaacagttggcccttgagcatgagtcttacgagatgggtgaagcacgcttccgcaagatgtttgagcgtcaacttaaagctggtgaggttgcggataacgctgccgccaagcctctcatcactaccctactccctaagatgattgcacgcatcaacgactggtttgaggaagtgaaagctaagcgcggcaagcgcccgacagccttccagttcctgcaagaaatcaagccggaagccgtagcgtacatcaccattaagaccactctggcttgcctaaccagtgcggacaatacaaccgttcaggctgtagcaagcgcaatcggtcgggccattgaggacgaggctcgcttcggtcgtatccgtgaccttgaagctaagcacttcaagaagaacgttgaggaacaactcaacaagcgcgtagggcacgtctacaagaaagcatttatgcaagttgtcgagcacgacatgctctctaagggtctactcggtggcgaggcgtggtcttcgtggcataaggaagactctattcatgtaggagtacgctgcatcgagatgctcattgagtcaaccggaatggttagcttacaccgccaaaatgctggcgtagtgggtgcagactctgagactatcgaactcgcacctgaatacgctgaggctatcgcaacccgtgcaggtgcgctggctggcatctctccgatgttccaaccttgcgtagttcctcctaagccgtggactggcattactggtggtggctattgggctgcggggcgcaaacccctgcagttagtacgtactcgcagtctgaaggcgcttcgccgctatgaagaagtgtcgatgccggaggtcatcaaagcagtcaacattgcgcagaatacagcatggcgtattaacaagaaagttctcgacgtagcgaataccatcacccaatggaagcactgtccagtcgcggatgtgcctgcgatggatcgtggcgaaatgccagctcgtccgttggacatcgataccaacgagattgcacttaaagcgtggaagaaagaagcttccgcgttctaccgcaaagacaaagcacgcatgagccgtcgtctgtcgatggagtttatgttatctcaggcgaacaagtttgcgaattatgaggcaatctggtttccgcaaaacatggattggcgtgggcgcgtgtacgctgtcccgatgttcaatcctcagggcaacgatatgacgaaaggcctgctgacctttgcgcaggagaaacccattggtgaagacggcttctattggctcaagattcatggcgcaaatacagctggagtggataaagtaccgtttccacaacgcatcaaatttgttgaggataaccatacgaatattatggaatgcgcgaaagcaccgctggaaaacacttggtgggcggaacaggactcgccgttctgctttctggcgttctgctttgagtatgctggcgtcatcaatagtggtctgtcgtacaactgtagcttgcctctggcatttgatggtagttgctccggcctgcaacatttctcagcgatgttacgcgacgaaattggcggcaaagctgtgaatctcctcccatctgcggaataccaggatatttatggtatcgtcagcgacaaagttaacgagatgctgaaacaagatctgattaacggtacctctaccaccgtggaaacggtgactgataaaaagacaggcgaaattacccaacgcacgaaatacgggaccaaagttatggcacagtggtggttagaacacggtgtgaatcgtggcgtcacgaaacgcccggttatgactttggtgtatgggagcaaagagtttggattccgcgatcaagtgctgagtgacaccattcaaccggcgatcgataacggcaagggtgacatgtttctgaatccgaatcaggctgctggttacatggcgaaactgatctggaacgcagtgtccgggaccgtagtcgcagcagttgaggcgatgaactggctgaaaagtgcggcgaaattacttgctgctgaagtgaaggatgagaagacggatacagttctgcgtggccgctgcgcagtacattgggtgactcccgacggcttccctgtgtggcaggaatacaagaagcctattcaaacgcgcttgaacctgatgttcctcggtcagttccgcttacagcctaccattaacaccaacaaagatagcgagattgatgcacgcaaacaggtgtctggtatcgctcctaactttgtacacagcctggacggtaaccaccttcgtatgactgtagtgtgggcacacgagaagtacggaatcgaatcttttgcactgattcacgactccttcggtaccattccggctgacgctgcgaacctgttcaaagcagtgcgcgaaactttcgttgacacatatgagtcttgtgatgtactggctgatttctacgaccagattgctgaccagttgcacgagtctcaacgcgacaaaatgccagcacttccggctaaaggtaagttgaacctccgtgacatcttaaaatcggacttcgcgttcgcg

SEQ ID NO: 1610 - protein, 890 aa, synthetic construct
  REGION 1..890: note = Variant of RNA polymerase
MHHHHHHMNTINIAKNDFSDIELAAIPFNTLADHYGERLAREQLALEHESYEMGEARFRKMFERQLKAGEVADNAAAKPLITTLLPKMIARINDWFEEVKAKRGKRPTAFQFLQEIKPEAVAYITIKTTLACLTSADNTTVQAVASAIGRAIEDEARFGRIRDLEAKHFKKNVEEQLNKRVGHVYKKAFMQVVEHDMLSKGLLGGEAWSSWHKEDSIHVGVRCIEMLIESTGMVSLHRQNAGVVGADSETIELAPEYAEAIATRAGALAGISPMFQPCVVPPKPWTGITGGGYWAAGRKPLQLVRTRSLKALRRYEEVSMPEVIKAVNIAQNTAWRINKKVLDVANTITQWKHCPVADVPAMDRGEMPARPLDIDTNEIALKAWKKEASAFYRKDKARMSRRLSMEFMLSQANKFANYEAIWFPQNMDWRGRVYAVPMFNPQGNDMTKGLLTFAQEKPIGEDGFYWLKIHGANTAGVDKVPFPQRIKFVEDNHTNIMECAKAPLENTWWAEQDSPFCFLAFCFEYAGVINSGLSYNCSLPLAFDGSCSGLQHFSAMLRDEIGGKAVNLLPSAEYQDIYGIVSDKVNEMLKQDLINGTSTTVETVTDKKTGEITQRTKYGTKVMAQWWLEHGVNRGVTKRPVMTLVYGSKEFGFRDQVLSDTIQPAIDNGKGDMFLNPNQAAGYMAKLIWNAVSGTVVAAVEAMNWLKSAAKLLAAEVKDEKTDTVLRGRCAVHWVTPDGFPVWQEYKKPIQTRLNLMFLGQFRLQPTINTNKDSEIDARKQVSGIAPNFVHSLDGNHLRMTVVWAHEKYGIESFALIHDSFGTIPADAANLFKAVRETFVDTYESCDVLADFYDQIADQLHESQRDKMPALPAKGKLNLRDILKSDFAFA

SEQ ID NO: 1611 - DNA, 2670 bp, synthetic construct
  misc_feature 1..2670: note = Variant of RNA polymerase
  source 1..2670: mol_type = other DNA
atgcaccatcaccatcaccatatgaacacgattaacattgctaagaacgacttctctgacatcgaactggctgctatcccgttcaacactctggctgaccattacggtgagcgtttagctcgcgaacagttggcccttgagcatgagtcttacgagatgggtgaagcacgcttccgcaagatgtttgagcgtcaacttaaagctggtgaggttgcggataacgctgccgccaagcctctcatcactaccctactccctaagatgattgcacgcatcaacgactggtttgaggaagtgaaagctaagcgcggcaagcgcccgacagccttccagttcctgcaagaaatcaagccggaagccgtagcgtacatcaccattaagaccactctggcttgcctaaccagtgcggacaatacaaccgttcaggctgtagcaagcgcaatcggtcgggccattgaggacgaggctcgcttcggtcgtatccgtgaccttgaagctaagcacttcaagaagaacgttgaggaacaactcaacaagcgcgtagggcacgtctacaagaaagcatttatgcaagttgtcgagcacgacatgctctctaagggtctactcggtggcgaggcgtggtcttcgtggcataaggaagactctattcatgtaggagtacgctgcatcgagatgctcattgagtcaaccggaatggttagcttacaccgccaaaatgctggcgtagtgggtgcagactctgagactatcgaactcgcacctgaatacgctgaggctatcgcaacccgtgcaggtgcgctggctggcatctctccgatgttccaaccttgcgtagttcctcctaagccgtggactggcattactggtggtggctattgggctgcggggcgcaaacccctgcagttagtacgtactcgcagtctggcggcgcttcgccgctatgaagaagtgtcgatgccggaggtcatcaaagcagtcaacattgcgcagaatacagcatggcgtattaacaagaaagttctcgacgtagcgaataccatcacccaatggaagcactgtccagtcgcggatgtgcctgcgatggatcgtggcgaaatgccagctaagccgttggacatcgataccaacgagattgcacttaaagcgtggaagaaagaagcttccgcgttctaccgcaaagacaaagcacgcatgagccgtcgtctgtcgatggagtttatgttatctcaggcgaacaagtttgcgaattatgaggcaatctggtttccgcaaaacatggattggcgtgggcgcgtgtacgctgtcccgatgttcaatcctcagggcaacgatatgacgaaaggcctgctgacctttgcgcaggagaaacccattggtgaagacggcttctattggctcaagattcatggcgcaaatacagctggagtggataaagtaccgtttccacaacgcatcaaatttgttgaggataaccatacgaatattatggaatgcgcgaaagcaccgctggaaaacacttggtgggcggaacaggactcgccgttctgctttctggcgttctgctttgagtatgctggcgtcatcaatagtggtctgtcgtacaactgtagcttgcctctggcatttgatggtagttgctccggcctgcaacatttctcagcgatgttacgcgacgaaattggcggcaaagctgtgaatctcctcccatctgcggaataccaggatatttatcgtatcgtcagcgacaaagttaacgagatgctgaaacaagatctgattaacggtacctctaccaccgtggaaacggtgactgataaaaagacaggcgaaattacccaacgcacgaaatacgggaccaaagttatggcagggtggtggttagaacacggtgtgaatcgtggcgtcacgaaacgcccggttatgactttggtgtatgggagcaaagagtttggattccgcgatcaagtgctgagtgacaccattcaaccggcgatcgataacggcaagggtgacatgtttctgaatccgaatcaggctgctggttacatggcgaaactgatctggaacgcggtgtccgggaccgtagtcgcagcagttgaggcgatgaactggctgaaaagtgcggcgaaattacttgctgctgaagtgaaggatgagaagacggatacagttctgcgtggccgctgcgcagtacattgggtgactcccgacggcttccctgtgtggcaggaatacaagaagcctattcaaacgcgcttgaacctgatgttcctcggtcagttccgcttacagcctaccattaacaccaacaaagatagcgagattgatgcacgcaaacaggtgtctggtatcgctcctaactttgtacacagcctggacggtaaccaccttcgtatgactgtagtgtgggcacacgagaagtacggaatcgaatcttttgcactgattcacgactccttcggtaccattccggctgacgctgcgaacctgttcaaagcagtgcgcgaaactttcgttgacacatatgagtcttgtgatgtactggctgatttctacgaccagattgctgaccagttgcacgagtctcaacgcgacaaaatgccagcacttccggctaaaggtaagttgaacctccgtgacatcttaaaatcggacttcgcgttcgcg

SEQ ID NO: 1612 - protein, 890 aa, synthetic construct
  REGION 1..890: note = Variant of RNA polymerase
MHHHHHHMNTINIAKNDFSDIELAAIPFNTLADHYGERLAREQLALEHESYEMGEARFRKMFERQLKAGEVADNAAAKPLITTLLPKMIARINDWFEEVKAKRGKRPTAFQFLQEIKPEAVAYITIKTTLACLTSADNTTVQAVASAIGRAIEDEARFGRIRDLEAKHFKKNVEEQLNKRVGHVYKKAFMQVVEHDMLSKGLLGGEAWSSWHKEDSIHVGVRCIEMLIESTGMVSLHRQNAGVVGADSETIELAPEYAEAIATRAGALAGISPMFQPCVVPPKPWTGITGGGYWAAGRKPLQLVRTRSLAALRRYEEVSMPEVIKAVNIAQNTAWRINKKVLDVANTITQWKHCPVADVPAMDRGEMPAKPLDIDTNEIALKAWKKEASAFYRKDKARMSRRLSMEFMLSQANKFANYEAIWFPQNMDWRGRVYAVPMFNPQGNDMTKGLLTFAQEKPIGEDGFYWLKIHGANTAGVDKVPFPQRIKFVEDNHTNIMECAKAPLENTWWAEQDSPFCFLAFCFEYAGVINSGLSYNCSLPLAFDGSCSGLQHFSAMLRDEIGGKAVNLLPSAEYQDIYRIVSDKVNEMLKQDLINGTSTTVETVTDKKTGEITQRTKYGTKVMAGWWLEHGVNRGVTKRPVMTLVYGSKEFGFRDQVLSDTIQPAIDNGKGDMFLNPNQAAGYMAKLIWNAVSGTVVAAVEAMNWLKSAAKLLAAEVKDEKTDTVLRGRCAVHWVTPDGFPVWQEYKKPIQTRLNLMFLGQFRLQPTINTNKDSEIDARKQVSGIAPNFVHSLDGNHLRMTVVWAHEKYGIESFALIHDSFGTIPADAANLFKAVRETFVDTYESCDVLADFYDQIADQLHESQRDKMPALPAKGKLNLRDILKSDFAFA

SEQ ID NO: 1613 - DNA, 2670 bp, synthetic construct
  misc_feature 1..2670: note = Variant of RNA polymerase
  source 1..2670: mol_type = other DNA
atgcaccatcaccatcaccatatgaacacgattaacattgctaagaacgacttctctgacatcgaactggctgctatcccgttcaacactctggctgaccattacggtgagcgtttagctcgcgaacagttggcccttgagcatgagtcttacgagatgggtgaagcacgcttccgcaagatgtttgagcgtcaacttaaagctggtgaggttgcggataacgctgccgccaagcctctcatcactaccctactccctaagatgattgcacgcatcaacgactggtttgaggaagtgaaagctaagcgcggcaagcgcccgacagccttccagttcctgcaagaaatcaagccggaagccgtagcgtacatcaccattaagaccactctggcttgcctaaccagtgcggacaatacaaccgttcaggctgtagcaagcgcaatcggtcgggccattgaggacgaggctcgcttcggtcgtatccgtgaccttgaagctaagcacttcaagaagaacgttgaggaacaactcaacaagcgcgtagggcacgtctacaagaaagcatttatgcaagttgtcgagcacgacatgctctctaagggtctactcggtggcgaggcgtggtcttcgtggcataaggaagactctattcatgtaggagtacgctgcatcgagatgctcattgagtcaaccggaatggttagcttacaccgccaaaatgctggcgtagtgggtgcagactctgagactatcgaactcgcacctgaatacgctgaggctatcgcaacccgtgcaggtgcgctggctggcatctctccgatgttccaaccttgcgtagttcctcctaagccgtggactggcattactggtggtggctattgggctgcggggcgcaaacccctgcagttagtacgtactcgcagtctggcggcggggcgccgctatgaagaagtgtcgatgccggaggtcatcaaagcagtcaacattgcgcagaatacagcatggcgtattaacaagaaagttctcgacgtagcgaataccatcacccaatggcagcactgtccagtcgcggatgtgcctgcgatggatcgtggcgaaatgccagctcgtccgttggacatcgataccaacgagattgcacttaaagcgtggaagaaagaagcttccgcgttctaccgcaaagacaaagcacgcatgagccgtcgtctgtcgatggagtttatgttatctcaggcgaacaagtttgcgaattatgaggcaatctggtttccgcaaaacatggattggcgtgggcgcgtgtacgctgtcccgatgttcaatcctcagggcaacgatatgacgaaaggcctgctgacctttgcgcaggagaaacccattggtgaagacggcttctattggctcaagattcatggcgcaaatacagctggagtggataaagtaccgtttccacaacgcatcaaatttgttgaggataaccatacgaatattatggaatgcgcgaaagcaccgctggaaaacacttggtgggcggaacaggactcgccgttctgctttctggcgttctgctttgagtatgctggcgtcatcaatagtggtctgtcgtacaactgtagcttgcctctggcatttgatggtagttgctccggcctgcaacatttctcagcgatgttacgcgacgaaattggcggcaaagctgtgaatctcctcccatctgcggaataccaggatatttatcgtatcgtcagcgacaaagttaacgagatgctgaaacaagatctgattaacggtacctctaccaccgtggaaacggtgactgataaaaagacaggcgaaattacccaacgcacgaaatacgggaccaaagttatggcacagtggtggttagaacacggtgtgaatcgtggcgtcacgaaacgcccggttatgactttggtgtatgggagcaaagagtttggattccgcgatcaagtgctgagtgacaccattcaaccggcgatcgataacggcaagggtgacatgtttctgaatccgaatcaggctgctggttacatggcgaaactgatctggaacgcagtgtccgggaccgtagtcgcagcagttgaggcgatgaactggctgaaaagtgcggcgaaattacttgctgctgaagtgaaggatgagaagacggatacagttctgcgtggccgctgcgcagtacattgggtgactcccgacggcttccctgtgtggcaggaatacaagaagcctattcaaacgcgcttgaacctgatgttcctcggtcagttccgcttacagcctaccattaacaccaacaaagatagcgagattgatgcacgcaaacaggtgtctggtatcgctcctaactttgtacacagcctggacggtaaccaccttcgtatgactgtagtgtgggcacacgagaagtacggaatcgaatcttttgcactgattcacgactccttcggtaccattccggctgacgctgcgaacctgttcaaagcagtgcgcgaaactttcgttgacacatatgagtcttgtgatgtactggctgatttctacgaccagattgctgaccagttgcacgagtctcaacgcgacaaaatgccagcacttccggctaaaggtaagttgaacctccgtgacatcttaaaatcggacttcgcgttcgcg

SEQ ID NO: 1614 - protein, 890 aa, synthetic construct
  REGION 1..890: note = Variant of RNA polymerase
MHHHHHHMNTINIAKNDFSDIELAAIPFNTLADHYGERLAREQLALEHESYEMGEARFRKMFERQLKAGEVADNAAAKPLITTLLPKMIARINDWFEEVKAKRGKRPTAFQFLQEIKPEAVAYITIKTTLACLTSADNTTVQAVASAIGRAIEDEARFGRIRDLEAKHFKKNVEEQLNKRVGHVYKKAFMQVVEHDMLSKGLLGGEAWSSWHKEDSIHVGVRCIEMLIESTGMVSLHRQNAGVVGADSETIELAPEYAEAIATRAGALAGISPMFQPCVVPPKPWTGITGGGYWAAGRKPLQLVRTRSLAAGRRYEEVSMPEVIKAVNIAQNTAWRINKKVLDVANTITQWQHCPVADVPAMDRGEMPARPLDIDTNEIALKAWKKEASAFYRKDKARMSRRLSMEFMLSQANKFANYEAIWFPQNMDWRGRVYAVPMFNPQGNDMTKGLLTFAQEKPIGEDGFYWLKIHGANTAGVDKVPFPQRIKFVEDNHTNIMECAKAPLENTWWAEQDSPFCFLAFCFEYAGVINSGLSYNCSLPLAFDGSCSGLQHFSAMLRDEIGGKAVNLLPSAEYQDIYRIVSDKVNEMLKQDLINGTSTTVETVTDKKTGEITQRTKYGTKVMAQWWLEHGVNRGVTKRPVMTLVYGSKEFGFRDQVLSDTIQPAIDNGKGDMFLNPNQAAGYMAKLIWNAVSGTVVAAVEAMNWLKSAAKLLAAEVKDEKTDTVLRGRCAVHWVTPDGFPVWQEYKKPIQTRLNLMFLGQFRLQPTINTNKDSEIDARKQVSGIAPNFVHSLDGNHLRMTVVWAHEKYGIESFALIHDSFGTIPADAANLFKAVRETFVDTYESCDVLADFYDQIADQLHESQRDKMPALPAKGKLNLRDILKSDFAFA

SEQ ID NO: 1615 - DNA, 2670 bp, synthetic construct
  misc_feature 1..2670: note = Variant of RNA polymerase
  source 1..2670: mol_type = other DNA
atgcaccatcaccatcaccatatgaacacgattaacattgctaagaacgacttctctgacatcgaactggctgctatcccgttcaacactctggctgaccattacggtgagcgtttagctcgcgaacagttggcccttgagcatgagtcttacgagatgggtgaagcacgcttccgcaagatgtttgagcgtcaacttaaagctggtgaggttgcggataacgctgccgccaagcctctcatcactaccctactccctaagatgattgcacgcatcaacgactggtttgaggaagtgaaagctaagcgcggcaagcgcccgacagccttccagttcctgcaagaaatcaagccggaagccgtagcgtacatcaccattaagaccactctggcttgcctaaccagtgcggacaatacaaccgttcaggctgtagcaagcgcaatcggtcgggccattgaggacgaggctcgcttcggtcgtatccgtgaccttgaagctaagcacttcaagaagaacgttgaggaacaactcaacaagcgcgtagggcacgtctacaagaaagcatttatgcaagttgtcgagcacgacatgctctctaagggtctactcggtggcgaggcgtggtcttcgtggcataaggaagactctattcatgtaggagtacgctgcatcgagatgctcattgagtcaaccggaatggttagcttacaccgccaaaatgctggcgtagtgggtgcagactctgagactatcgaactcgcacctgaatacgctgaggctatcgcaacccgtgcaggtgcgctggctggcatctctccgatgttccaaccttgcgtagttcctcctaagccgtggactggcattactggtggtggctattgggctgcggggcgcaaacccctgcagttagtacgtactcgcagtctggcggcgcttcgccgctatgaagaagtgtcgatgccggaggtcatcaaagcagtcaacattgcgcagaatacagcatggcgtattaacaagaaagttctcgacgtagcgaataccatcacccaatggcagcactgtccagtcgccgatgttcctgcgatggatcgtggcgaaatgccagctcgtccgttggacatcgataccaacgagattgcacttaaagcgtggaagaaagaagcttccgcgttctaccgcaaagacaaagcacgcatgagccgtcgtctgtcgatggagtttatgttatctcaggcgaacaagtttgcgaattatgaggcaatctggtttccgcaaaacatggattggcgtgggcgcgtgtacgctgtcccgatgttcaatcctcagggcaacgatatgacgaaaggcctgctgacctttgcgcaggagaaacccattggtgaagacggcttctattggctcaagattcatggcgcaaatacagctggagtggataaagtaccgtttccacaacgcatcaaatttgttgaggataaccatacgaatattatggaatgcgcgaaagcaccgctggaaaacacttggtgggcggaacaggactcgccgttctgctttctggcgttctgctttgagtatgctggcgtcatcaatagtggtctgtcgtacaactgtagcttgcctctggcatttgatggtagttgctccggcctgcaacatttctcagcgatgttacgcgacgaaattggcggcaaagctgtgaatctcctcccatctgcggaataccaggatatttatcgtatcgtcagcgacaaagttaacgagatgctgaaacaagatctgattaacggtacctctaccaccgtggaaacggtgactgataaaaagacaggcgaaattacccaacgcacgaaatacgggaccaaagttatggcagggtggtggttagaacacggtgtgaatcgtggcgtcacgaaacgcccggttatgactttggtgtatgggagcaaagagtttggattccgcgatcaagtgctgagtgacaccattcaaccggcgatcgataacggcaagggtctgatgtttctgaatccgaatcaggctgctggttacatggcgaaactgatctggaacgcagtgtccgggaccgtagtcgcagcagttgaggcgatgaactggctgaaaagtgcggcgaaattacttgctgctgaagtgaaggatgagaagacggatacagttctgcgtggccgctgcgcagtacattgggtgactcccgacggcttccctgtgtggcaggaatacaagaagcctattcaaacgcgcttgaacctgatgttcctcggtcagttccgcttacagcctaccattaacaccaacaaagatagcgagattgatgcacgcaaacaggtgtctggtatcgctcctaactttgtacacagcctggacggtaaccaccttcgtatgactgtagtgtgggcacacgagaagtacggaatcgaatcttttgcactgattcacgactccttcggtaccattccggctgacgctgcgaacctgttcaaagcagtgcgcgaaactttcgttgacacatatgagtcttgtgatgtactggctgatttctacgaccagattgctgaccagttgcacgagtctcaacgcgacaaaatgccagcacttccggctaaaggtaagttgaacctccgtgacatcttaaaatcggacttcgcgttcgcg

SEQ ID NO: 1616 - protein, 890 aa, synthetic construct
  REGION 1..890: note = Variant of RNA polymerase
MHHHHHHMNTINIAKNDFSDIELAAIPFNTLADHYGERLAREQLALEHESYEMGEARFRKMFERQLKAGEVADNAAAKPLITTLLPKMIARINDWFEEVKAKRGKRPTAFQFLQEIKPEAVAYITIKTTLACLTSADNTTVQAVASAIGRAIEDEARFGRIRDLEAKHFKKNVEEQLNKRVGHVYKKAFMQVVEHDMLSKGLLGGEAWSSWHKEDSIHVGVRCIEMLIESTGMVSLHRQNAGVVGADSETIELAPEYAEAIATRAGALAGISPMFQPCVVPPKPWTGITGGGYWAAGRKPLQLVRTRSLAALRRYEEVSMPEVIKAVNIAQNTAWRINKKVLDVANTITQWQHCPVADVPAMDRGEMPARPLDIDTNEIALKAWKKEASAFYRKDKARMSRRLSMEFMLSQANKFANYEAIWFPQNMDWRGRVYAVPMFNPQGNDMTKGLLTFAQEKPIGEDGFYWLKIHGANTAGVDKVPFPQRIKFVEDNHTNIMECAKAPLENTWWAEQDSPFCFLAFCFEYAGVINSGLSYNCSLPLAFDGSCSGLQHFSAMLRDEIGGKAVNLLPSAEYQDIYRIVSDKVNEMLKQDLINGTSTTVETVTDKKTGEITQRTKYGTKVMAGWWLEHGVNRGVTKRPVMTLVYGSKEFGFRDQVLSDTIQPAIDNGKGLMFLNPNQAAGYMAKLIWNAVSGTVVAAVEAMNWLKSAAKLLAAEVKDEKTDTVLRGRCAVHWVTPDGFPVWQEYKKPIQTRLNLMFLGQFRLQPTINTNKDSEIDARKQVSGIAPNFVHSLDGNHLRMTVVWAHEKYGIESFALIHDSFGTIPADAANLFKAVRETFVDTYESCDVLADFYDQIADQLHESQRDKMPALPAKGKLNLRDILKSDFAFA

SEQ ID NO: 1617 - DNA, 2670 bp, synthetic construct
  misc_feature 1..2670: note = Variant of RNA polymerase
  source 1..2670: mol_type = other DNA
atgcaccatcaccatcaccatatgaacacgattaacattgctaagaacgacttctctgacatcgaactggctgctatcccgttcaacactctggctgaccattacggtgagcgtttagctcgcgaacagttggcccttgagcatgagtcttacgagatgggtgaagcacgcttccgcaagatgtttgagcgtcaacttaaagctggtgaggttgcggataacgctgccgccaagcctctcatcactaccctactccctaagatgattgcacgcatcaacgactggtttgaggaagtgaaagctaagcgcggcaagcgcccgacagccttccagttcctgcaagaaatcaagccggaagccgtagcgtacatcaccattaagaccactctggcttgcctaaccagtgcggacaatacaaccgttcaggctgtagcaagcgcaatcggtcgggccattgaggacgaggctcgcttcggtcgtatccgtgaccttgaagctaagcacttcaagaagaacgttgaggaacaactcaacaagcgcgtagggcacgtctacaagaaagcatttatgcaagttgtcgagcacgacatgctctctaagggtctactcggtggcgaggcgtggtcttcgtggcataaggaagactctattcatgtaggagtacgctgcatcgagatgctcattgagtcaaccggaatggttagcttacaccgccaaaatgctggcgtagtgggtgcagactctgagactatcgaactcgcacctgaatacgctgaggctatcgcaacccgtgcaggtgcgctggctggcatctctccgatgttccaaccttgcgtagttcctcctaagccgtggactggcattactggtggtggctattgggctgcggggcgcaaacccctgcagttagtacgtactcgcagtctgaaggcgcttcgccgctatgaagaagtgtcgatgccggaggtcatcaaagcagtcaacattgcgcagaatacagcatggcgtattaacaagaaagttctcgacgtagcgaataccatcacccaatggcagcactgtccagtccgtgatattcctgcgatggatcgtggcgaaatgccagctcgcccgttggacatcgataccaacgagattgcacttaaagcgtggaagaaagaagcttccgcgttctaccgccgcgacaaagcacgcatgagccgtcgtctgtcgatggagtttatgttatctcaggcgaacaagtttgcgaattatgaggcaatctggtttccgcaaaacatggattggcgtgggcgcgtgtacgctgtcccgatgttcaatcctcagggcaacgatatgacgaaaggcctgctgacctttgcgcaggagaaacccattggtgaagacggcttctattggctcaagattcatggcgcaaatacagctggagtggataaagtaccgtttccacaacgcatcaaatttattgaggataaccatacgaatattatggaatgcgcgaaagcaccgctggaaaacacttggtgggcggaacaggactcgccgttctgctttctggcgttctgctttgagtatgctggcgtcatcaatagtggtctgtcgtacaactgtagcttgcctctggcatttgatggtagttgctccggcctgcaacatttctcagcgatgttacgcgacgaagttggcggcaaagctgtgaatctcctcccatctgcggaataccaggatatttatcgtatcgtcagcgacaaagttaacgagatgctgaaacaagatctgattaacggtacctctaccaccgtggaaacggtgactgataaaaagacaggcgaaattacccaacgcacgaaatacgggaccaaagttatggcagggtggtggttagaacacggtgtgaatcgtggcgtcacgaaacgcccggttatgactttggtgtatgggagcaaagagtttggattccgcgatcaagtgctgagtgacaccattcaaccggcgatcgataacggcaagggtgacatgtttctgaatccgaatcaggctgctggttacatggcgaaactgatctggaacgcagtgtccgggaccgtagtcgcagcagttgaggcgatgaactggctgaaaagtgcggcgaaattacttgctgctgaagtgaaggatgagaagacggatacaattctgcgtggccgctgcgcagtacattgggtgactcccgacggcttccctgtgtggcaggaatacaagaagcctattcaaacgcgcttgaacctgatgttcctcggtcagttccgcttacagcctaccattaacaccaacaaagatagcgagattgatgcacgcaaacaggtgtctggtatcgctcctaactttgtacacagcctggacggtaaccaccttcgtatgactgtagtgtgggcacacgagaagtacggaatcgaatcttttgcactgattcacgactccttcggtaccattccggctgacgctgcgaacctgttcaaagcagtgcgcgaaactttcgttgacacatatgagtcttgtgatgtactggctgatttctacgaccagattgctgaccagttgcacgagtctcaacgcgacaaaatgccagcacttccggctaaaggtaagttgaacctccgtgacatcttaaaatcggacttcgcgttcgcg

SEQ ID NO: 1618 - protein, 890 aa, synthetic construct
  REGION 1..890: note = Variant of RNA polymerase
MHHHHHHMNTINIAKNDFSDIELAAIPFNTLADHYGERLAREQLALEHESYEMGEARFRKMFERQLKAGEVADNAAAKPLITTLLPKMIARINDWFEEVKAKRGKRPTAFQFLQEIKPEAVAYITIKTTLACLTSADNTTVQAVASAIGRAIEDEARFGRIRDLEAKHFKKNVEEQLNKRVGHVYKKAFMQVVEHDMLSKGLLGGEAWSSWHKEDSIHVGVRCIEMLIESTGMVSLHRQNAGVVGADSETIELAPEYAEAIATRAGALAGISPMFQPCVVPPKPWTGITGGGYWAAGRKPLQLVRTRSLKALRRYEEVSMPEVIKAVNIAQNTAWRINKKVLDVANTITQWQHCPVRDIPAMDRGEMPARPLDIDTNEIALKAWKKEASAFYRRDKARMSRRLSMEFMLSQANKFANYEAIWFPQNMDWRGRVYAVPMFNPQGNDMTKGLLTFAQEKPIGEDGFYWLKIHGANTAGVDKVPFPQRIKFIEDNHTNIMECAKAPLENTWWAEQDSPFCFLAFCFEYAGVINSGLSYNCSLPLAFDGSCSGLQHFSAMLRDEVGGKAVNLLPSAEYQDIYRIVSDKVNEMLKQDLINGTSTTVETVTDKKTGEITQRTKYGTKVMAGWWLEHGVNRGVTKRPVMTLVYGSKEFGFRDQVLSDTIQPAIDNGKGDMFLNPNQAAGYMAKLIWNAVSGTVVAAVEAMNWLKSAAKLLAAEVKDEKTDTILRGRCAVHWVTPDGFPVWQEYKKPIQTRLNLMFLGQFRLQPTINTNKDSEIDARKQVSGIAPNFVHSLDGNHLRMTVVWAHEKYGIESFALIHDSFGTIPADAANLFKAVRETFVDTYESCDVLADFYDQIADQLHESQRDKMPALPAKGKLNLRDILKSDFAFA

SEQ ID NO: 1619 - DNA, 2670 bp, synthetic construct
  misc_feature 1..2670: note = Variant of RNA polymerase
  source 1..2670: mol_type = other DNA
atgcaccatcaccatcaccatatgaacacgattaacattgctaagaacgacttctctgacatcgaactggctgctatcccgttcaacactctggctgaccattacggtgagcgtttagctcgcgaacagttggcccttgagcatgagtcttacgagatgggtgaagcacgcttccgcaagatgtttgagcgtcaacttaaagctggtgaggttgcggataacgctgccgccaagcctctcatcactaccctactccctaagatgattgcacgcatcaacgactggtttgaggaagtgaaagctaagcgcggcaagcgcccgacagccttccagttcctgcaagaaatcaagccggaagccgtagcgtacatcaccattaagaccactctggcttgcctaaccagtgcggacaatacaaccgttcaggctgtagcaagcgcaatcggtcgggccattgaggacgaggctcgcttcggtcgtatccgtgaccttgaagctaagcacttcaagaagaacgttgaggaacaactcaacaagcgcgtagggcacgtctacaagaaagcatttatgcaagttgtcgagcacgacatgctctctaagggtctactcggtggcgaggcgtggtcttcgtggcataaggaagactctattcatgtaggagtacgctgcatcgagatgctcattgagtcaaccggaatggttagcttacaccgccaaaatgctggcgtagtgggtgcagactctgagactatcgaactcgcacctgaatacgctgaggctatcgcaacccgtgcaggtgcgctggctggcatctctccgatgttccaaccttgcgtagttcctcctaagccgtggactggcattactggtggtggctattgggctgcggggcgcaaacccctgcagttagtacgtactcgcagtctggcggcgcttcgccgctatgaagaagtgtcgatgccggaggtcatcaaagcagtcaacattgcgcagaatacagcatggcgtattaacaagaaagttctcgacgtagcgaataccatcacccaatggcagcactgtccagtcgcggatgtgcctgcgatggatcgtggcgaaatgccagctcgcccgttggacatcgataccaacgagattgcacttaaagcgtggaagaaagaagcttccgcgttctaccgcaaagacaaagcacgcatgagccgtcgtctgtcgatggagtttatgttatctcaggcgaacaagtttgcgaattatgaggcaatctggtttccgcaaaacatggattggcgtgggcgcgtgtacgctgtcccgatgttcaatcctcagggcaacgatatgacgaaaggcctgctgacctttgcgcaggagaaacccattggtgaagacggcttctattggctcaagattcatggcgcaaatacagctggagtggataaagtaccgtttccacaacgcatcaaatttgttgaggataaccatacgaatattatggaatgcgcgaaagcaccgctggaaaacacttggtgggcggaacaggactcgccgttctgctttctggcgttctgctttgagtatgctggcgtcatcaatagtggtctgtcgtacaactgtagcttgcctctggcatttgatggtagttgctccggcctgcaacatttctcagcgatgttacgcgacgaaattggcggcaaagctgtgaatctcctcccatctgcggaataccaggatatttatcgtatcgtcagcgacaaagttaacgagatgctgaaacaagatctgattaacggtacctctaccaccgtggaaacggtgactgataaaaagacaggcgaaattacccaacgcacgaaatacgggaccaaagttatggcagggtggtggttagaacacggtgtgaatcgtggcgtcacgaaacgcccggttatgactttggtgtatgggagcaaagagtttggattccgcgatcaagtgctgagtgacaccattcaaccggcgatcgataacggcaagggtgacatgtttctgaatccgaatcaggctgctggttacatggcgaaactgatctggaacgcagtgtccgggaccgtagtcgcagcagttgaggcgatgaactggctgaaaagtgcggcgaaattacttgctgctgaagtgaaggatgagaagacggatacaattctgcgtggccgctgcgcagtacattgggtgactcccgacggcttccctgtgtggcaggaatacaagaagcctattcaaacgcgcttgaacctgatgttcctcggtcagttccgcttacagcctaccattaacaccaacaaagatagcgagattgatgcacgcaaacaggtgtctggtatcgctcctaactttgtacacagcctggacggtaaccaccttcgtatgactgtagtgtgggcacacgagaagtacggaatcgaatcttttgcactgattcacgactccttcggtaccattccggctgacgctgcgaacctgttcaaagcagtgcgcgaaactttcgttgacacatatgagtcttgtgatgtactggctgatttctacgaccagattgctgaccagttgcacgagtctcaacgcgacaaaatgccagcacttccggctaaaggtaagttgaacctccgtgacatcttaaaatcggacttcgcgttcgcg

SEQ ID NO: 1620 - protein, 890 aa, synthetic construct
  REGION 1..890: note = Variant of RNA polymerase
MHHHHHHMNTINIAKNDFSDIELAAIPFNTLADHYGERLAREQLALEHESYEMGEARFRKMFERQLKAGEVADNAAAKPLITTLLPKMIARINDWFEEVKAKRGKRPTAFQFLQEIKPEAVAYITIKTTLACLTSADNTTVQAVASAIGRAIEDEARFGRIRDLEAKHFKKNVEEQLNKRVGHVYKKAFMQVVEHDMLSKGLLGGEAWSSWHKEDSIHVGVRCIEMLIESTGMVSLHRQNAGVVGADSETIELAPEYAEAIATRAGALAGISPMFQPCVVPPKPWTGITGGGYWAAGRKPLQLVRTRSLAALRRYEEVSMPEVIKAVNIAQNTAWRINKKVLDVANTITQWQHCPVADVPAMDRGEMPARPLDIDTNEIALKAWKKEASAFYRKDKARMSRRLSMEFMLSQANKFANYEAIWFPQNMDWRGRVYAVPMFNPQGNDMTKGLLTFAQEKPIGEDGFYWLKIHGANTAGVDKVPFPQRIKFVEDNHTNIMECAKAPLENTWWAEQDSPFCFLAFCFEYAGVINSGLSYNCSLPLAFDGSCSGLQHFSAMLRDEIGGKAVNLLPSAEYQDIYRIVSDKVNEMLKQDLINGTSTTVETVTDKKTGEITQRTKYGTKVMAGWWLEHGVNRGVTKRPVMTLVYGSKEFGFRDQVLSDTIQPAIDNGKGDMFLNPNQAAGYMAKLIWNAVSGTVVAAVEAMNWLKSAAKLLAAEVKDEKTDTILRGRCAVHWVTPDGFPVWQEYKKPIQTRLNLMFLGQFRLQPTINTNKDSEIDARKQVSGIAPNFVHSLDGNHLRMTVVWAHEKYGIESFALIHDSFGTIPADAANLFKAVRETFVDTYESCDVLADFYDQIADQLHESQRDKMPALPAKGKLNLRDILKSDFAFA

SEQ ID NO: 1621 - DNA, 2670 bp, synthetic construct
  misc_feature 1..2670: note = Variant of RNA polymerase
  source 1..2670: mol_type = other DNA
atgcaccatcaccatcaccatatgaacacgattaacattgctaagaacgacttctctgacatcgaactggctgctatcccgttcaacactctggctgaccattacggtgagcgtttagctcgcgaacagttggcccttgagcatgagtcttacgagatgggtgaagcacgcttccgcaagatgtttgagcgtcaacttaaagctggtgaggttgcggataacgctgccgccaagcctctcatcactaccctactccctaagatgattgcacgcatcaacgactggtttgaggaagtgaaagctaagcgcggcaagcgcccgacagccttccagttcctgcaagaaatcaagccggaagccgtagcgtacatcaccattaagaccactctggcttgcctaaccagtgcggacaatacaaccgttcaggctgtagcaagcgcaatcggtcgggccattgaggacgaggctcgcttcggtcgtatccgtgaccttgaagctaagcacttcaagaagaacgttgaggaacaactcaacaagcgcgtagggcacgtctacaagaaagcatttatgcaagttgtcgagcacgacatgctctctaagggtctactcggtggcgaggcgtggtcttcgtggcataaggaagactctattcatgtaggagtacgctgcatcgagatgctcattgagtcaaccggaatggttagcttacaccgccaaaatgctggcgtagtgggtgcagactctgagactatcgaactcgcacctgaatacgctgaggctatcgcaacccgtgcaggtgcgctggctggcatctctccgatgttccaaccttgcgtagttcctcctaagccgtggactggcattactggtggtggctattgggctgcggggcgcaaacccctgcagttagtacgtactcgcagtctgaaggcgcttcgccgctatgaagaagtgtcgatgccggaggtcatcaaagcagtcaacattgcgcagaatacagcatggcgtattaacaagaaagttctcgacgtagcgaataccatcacccaatggcagcactgtccagtcgcggatgtgcctgcgatggatcgtggcgaaatgccagctcgtccgttggacatcgataccaacgagattgcacttaaagcgtggaagaaagaagcttccgcgttctaccgcaaagacaaagcacgcatgagccgtcgtctgtcgatggagtttatgttatctcaggcgaacaagtttgcgaattatgaggcaatctggtttccgcaaaacatggattggcgtgggcgcgtgtacgctgtcccgatgttcaatcctcagggcaacgatatgacgaaaggcctgctgacctttgcgcaggagaaacccattggtgaagacggcttctattggctcaagattcatggcgcaaatacagctggagtggataaagtaccgtttccacaacgcatcaaatttgttgaggataaccatacgaatattatggaatgcgcgaaagcaccgctggaaaacacttggtgggcggaacaggactcgccgttctgctttctggcgttctgctttgagtatgctggcgtcatcaatagtggtctgtcgtacaactgtagcttgcctctggcatttgatggtagttgctccggcctgcaacatttctcagcgatgttacgcgacgaaattggcggcaaagctgtgaatctcctcccatctgcggaataccaggatatttatcgtatcgtcagcgacaaagttaacgagatgctgaaacaagatctgattaacggtacctctaccaccgtggaaacggtgactgataaaaagacaggcgaaattacccaacgcacgaaatacgggaccaaagttatggcagggtggtggttagaacacggtgtgaatcgtggcgtcacgaaacgcccggttatgactttggtgtatgggagcaaagagtttggattccgcgatcaagtgctgagtgacaccattcaaccggcgatcgataacggcaagggtgacatgtttctgaatccgaatcaggctgctggttacatggcgaaactgatctggaacgcagtgtccgggaccgtagtcgcagcagttgaggcgatgaactggctgaaaagtgcggcgaaattacttgctgctgaagtgaaggatgagaagacggatacagttctgcgtggccgctgcgcagtacattgggtgactcccgacggcttccctgtgtggcaggaatacaagaagcctattcaaacgcgcttgaacctgatgttcctcggtcagttccgcttacagcctaccattaacaccaacaaagatagcgagattgatgcacgcaaacaggtgtctggtatcgctcctaactttgtacacagcctggacggtaaccaccttcgtatgactgtagtgtgggcacacgagaagtacggaatcgaatcttttgcactgattcacgactccttcggtaccattccggctgacgctgcgaacctgttcaaagcagtgcgcgaaactttcgttgacacatatgagtcttgtgatgtactggctgatttctacgaccagattgctgaccagttgcacgagtctcaacgcgacaaaatgccagcacttccggctaaaggtaagttgaacctccgtgacatcttaaaatcggacttcgcgttcgcg

SEQ ID NO: 1622 - protein, 890 aa, synthetic construct
  REGION 1..890: note = Variant of RNA polymerase
MHHHHHHMNTINIAKNDFSDIELAAIPFNTLADHYGERLAREQLALEHESYEMGEARFRKMFERQLKAGEVADNAAAKPLITTLLPKMIARINDWFEEVKAKRGKRPTAFQFLQEIKPEAVAYITIKTTLACLTSADNTTVQAVASAIGRAIEDEARFGRIRDLEAKHFKKNVEEQLNKRVGHVYKKAFMQVVEHDMLSKGLLGGEAWSSWHKEDSIHVGVRCIEMLIESTGMVSLHRQNAGVVGADSETIELAPEYAEAIATRAGALAGISPMFQPCVVPPKPWTGITGGGYWAAGRKPLQLVRTRSLKALRRYEEVSMPEVIKAVNIAQNTAWRINKKVLDVANTITQWQHCPVADVPAMDRGEMPARPLDIDTNEIALKAWKKEASAFYRKDKARMSRRLSMEFMLSQANKFANYEAIWFPQNMDWRGRVYAVPMFNPQGNDMTKGLLTFAQEKPIGEDGFYWLKIHGANTAGVDKVPFPQRIKFVEDNHTNIMECAKAPLENTWWAEQDSPFCFLAFCFEYAGVINSGLSYNCSLPLAFDGSCSGLQHFSAMLRDEIGGKAVNLLPSAEYQDIYRIVSDKVNEMLKQDLINGTSTTVETVTDKKTGEITQRTKYGTKVMAGWWLEHGVNRGVTKRPVMTLVYGSKEFGFRDQVLSDTIQPAIDNGKGDMFLNPNQAAGYMAKLIWNAVSGTVVAAVEAMNWLKSAAKLLAAEVKDEKTDTVLRGRCAVHWVTPDGFPVWQEYKKPIQTRLNLMFLGQFRLQPTINTNKDSEIDARKQVSGIAPNFVHSLDGNHLRMTVVWAHEKYGIESFALIHDSFGTIPADAANLFKAVRETFVDTYESCDVLADFYDQIADQLHESQRDKMPALPAKGKLNLRDILKSDFAFA

SEQ ID NO: 1623 - DNA, 2670 bp, synthetic construct
  misc_feature 1..2670: note = Variant of RNA polymerase
  source 1..2670: mol_type = other DNA
atgcaccatcaccatcaccatatgaacacgattaacattgctaagaacgacttctctgacatcgaactggctgctatcccgttcaacactctggctgaccattacggtgagcgtttagctcgcgaacagttggcccttgagcatgagtcttacgagatgggtgaagcacgcttccgcaagatgtttgagcgtcaacttaaagctggtgaggttgcggataacgctgccgccaagcctctcatcactaccctactccctaagatgattgcacgcatcaacgactggtttgaggaagtgaaagctaagcgcggcaagcgcccgacagccttccagttcctgcaagaaatcaagccggaagccgtagcgtacatcaccattaagaccactctggcttgcctaaccagtgcggacaatacaaccgttcaggctgtagcaagcgcaatcggtcgggccattgaggacgaggctcgcttcggtcgtatccgtgaccttgaagctaagcacttcaagaagaacgttgaggaacaactcaacaagcgcgtagggcacgtctacaagaaagcatttatgcaagttgtcgagcacgacatgctctctaagggtctactcggtggcgaggcgtggtcttcgtggcataaggaagactctattcatgtaggagtacgctgcatcgagatgctcattgagtcaaccggaatggttagcttacaccgccaaaatgctggcgtagtgggtgcagactctgagactatcgaactcgcacctgaatacgctgaggctatcgcaacccgtgcaggtgcgctggctggcatctctccgatgttccaaccttgcgtagttcctcctaagccgtggactggcattactggtggtggctattgggctgcggggcgcaaacccctgcagttagtacgtactcgcagtctggcggcgcttcgccgctatgaagaagtgtcgatgccggaggtcatcaaagcagtcaacattgcgcagaatacagcatggcgtattaacaagaaagttctcgacgtagcgaataccatcacccaatggcagcactgtccagtcgcggatgtgcctgcgatggatcgtggcgaaatgccagctcgtccgttggacatcgataccaacgagattgcacttaaagcgtggaagaaagaagcttccgcgttctaccgcaaagacaaagcacgcatgagccgtcgtctgtcgatggagtttatgttatctcaggcgaacaagtttgcgaattatgaggcaatctggtttccgcaaaacatggattggcgtgggcgcgtgtacgctgtcccgatgttcaatcctcagggcaacgatatgacgaaaggcctgctgacctttgcgcaggagaaacccattggtgaagacggcttctattggctcaagattcatggcgcaaatacagctggagtggataaagtaccgtttccacaacgcatcaaatttgttgaggataaccatacgaatattatggaatgcgcgaaagcaccgctggaaaacacttggtgggcggaacaggactcgccgttctgctttctggcgttctgctttgagtatgctggcgtcatcaatagtggtctgtcgtacaactgtagcttgcctctggcatttgatggtagttgctccggcctgcaacatttctcagcgatgttacgcgacgaaattggcggcaaagctgtgaatctcctcccatctgcggaataccaggatatttatcgtatcgtcagcgacaaagttaacgagatgctgaaacaagatctgattaacggtacctctaccaccgtggaaacggtgactgataaaaagacaggcgaaattacccaacgcacgaaatacgggaccaaagttatggcacagtggtggttagaacacggtgtgaatcgtggcgtcacgaaacgcccggttatgactttggtgtatgggagcaaagagtttggattccgcgatcaactgctgagtgacaccattcaaccggcgatcgataacggcaagggtgacatgtttctgaatccgaatcaggctgctggttacatggcgaaactgatctggaacgcagtgtccgggaccgtagtcgcagcagttgaggcgatgaactggctgaaaagtgcggcgaaattacttgctgctgaagtgaaggatgagaagacggatacagttctgcgtggccgctgcgcagtacattgggtgactcccgacggcttccctgtgtggcaggaatacaagaagcctattcaaacgcgcttgaacctgatgttcctcggtcagttccgcttacagcctaccattaacaccaacaaagatagcgagattgatgcacgcaaacaggtgtctggtatcgctcctaactttgtacacagcctggacggtaaccaccttcgtatgactgtagtgtgggcacacgagaagtacggaatcgaatcttttgcactgattcacgactccttcggtaccattccggctgacgctgcgaacctgttcaaagcagtgcgcgaaactttcgttgacacatatgagtcttgtgatgtactggctgatttctacgaccagattgctgaccagttgcacgagtctcaacgcgacaaaatgccagcacttccggctaaaggtaagttgaacctccgtgacatcttaaaatcggacttcgcgttcgcg

SEQ ID NO: 1624 - protein, 890 aa, synthetic construct
  REGION 1..890: note = Variant of RNA polymerase
MHHHHHHMNTINIAKNDFSDIELAAIPFNTLADHYGERLAREQLALEHESYEMGEARFRKMFERQLKAGEVADNAAAKPLITTLLPKMIARINDWFEEVKAKRGKRPTAFQFLQEIKPEAVAYITIKTTLACLTSADNTTVQAVASAIGRAIEDEARFGRIRDLEAKHFKKNVEEQLNKRVGHVYKKAFMQVVEHDMLSKGLLGGEAWSSWHKEDSIHVGVRCIEMLIESTGMVSLHRQNAGVVGADSETIELAPEYAEAIATRAGALAGISPMFQPCVVPPKPWTGITGGGYWAAGRKPLQLVRTRSLAALRRYEEVSMPEVIKAVNIAQNTAWRINKKVLDVANTITQWQHCPVADVPAMDRGEMPARPLDIDTNEIALKAWKKEASAFYRKDKARMSRRLSMEFMLSQANKFANYEAIWFPQNMDWRGRVYAVPMFNPQGNDMTKGLLTFAQEKPIGEDGFYWLKIHGANTAGVDKVPFPQRIKFVEDNHTNIMECAKAPLENTWWAEQDSPFCFLAFCFEYAGVINSGLSYNCSLPLAFDGSCSGLQHFSAMLRDEIGGKAVNLLPSAEYQDIYRIVSDKVNEMLKQDLINGTSTTVETVTDKKTGEITQRTKYGTKVMAQWWLEHGVNRGVTKRPVMTLVYGSKEFGFRDQLLSDTIQPAIDNGKGDMFLNPNQAAGYMAKLIWNAVSGTVVAAVEAMNWLKSAAKLLAAEVKDEKTDTVLRGRCAVHWVTPDGFPVWQEYKKPIQTRLNLMFLGQFRLQPTINTNKDSEIDARKQVSGIAPNFVHSLDGNHLRMTVVWAHEKYGIESFALIHDSFGTIPADAANLFKAVRETFVDTYESCDVLADFYDQIADQLHESQRDKMPALPAKGKLNLRDILKSDFAFA

SEQ ID NO: 1625 - DNA, 2670 bp, synthetic construct
  misc_feature 1..2670: note = Variant of RNA polymerase
  source 1..2670: mol_type = other DNA
atgcaccatcaccatcaccatatgaacacgattaacattgctaagaacgacttctctgacatcgaactggctgctatcccgttcaacactctggctgaccattacggtgagcgtttagctcgcgaacagttggcccttgagcatgagtcttacgagatgggtgaagcacgcttccgcaagatgtttgagcgtcaacttaaagctggtgaggttgcggataacgctgccgccaagcctctcatcactaccctactccctaagatgattgcacgcatcaacgactggtttgaggaagtgaaagctaagcgcggcaagcgcccgacagccttccagttcctgcaagaaatcaagccggaagccgtagcgtacatcaccattaagaccactctggcttgcctaaccagtgcggacaatacaaccgttcaggctgtagcaagcgcaatcggtcgggccattgaggacgaggctcgcttcggtcgtatccgtgaccttgaagctaagcacttcaagaagaacgttgaggaacaactcaacaagcgcgtagggcacgtctacaagaaagcatttatgcaagttgtcgagcacgacatgctctctaagggtctactcggtggcgaggcgtggtcttcgtggcataaggaagactctattcatgtaggagtacgctgcatcgagatgctcattgagtcaaccggaatggttagcttacaccgccaaaatgctggcgtagtgggtgcagactctgagactatcgaactcgcacctgaatacgctgaggctatcgcaacccgtgcaggtgcgctggctggcatctctccgatgttccaaccttgcgtagttcctcctaagccgtggactggcattactggtggtggctattgggctgcggggcgcaaacccctgcagttagtacgtactcgcagtctggcggcgcttcgccgctatgaagaagtgtcgatgccggaggtcatcaaagcagtcaacattgcgcagaatacagcatggcgtattaacaagaaagttctcgacgtagcgaataccatcacccaatggaagcactgtccagtcgccgatattcctgcgatggatcgtggcgaaatgccagctcgtccgttggacatcgataccaacgagattgcacttaaagcgtggaagaaagaagcttccgcgttctaccgccgcgacaaagcacgcatgagccgtcgtctgtcgatggagtttatgttatctcaggcgaacaagtttgcgaattatgaggcaatctggtttccgcaaaacatggattggcgtgggcgcgtgtacgctgtcccgatgttcaatcctcagggcaacgatatgacgaaaggcctgctgacctttgcgcaggagaaacccattggtgaagacggcttctattggctcaagattcatggcgcaaatacagctggagtggataaagtaccgtttccacaacgcatcaaatttgttgaggataaccatacgaatattatggaatgcgcgaaagcaccgctggaaaacacttggtgggcggaacaggactcgccgttctgctttctggcgttctgctttgagtatgctggcgtcatcaatagtggtctgtcgtacaactgtagcttgcctctggcatttgatggtagttgctccggcctgcaacatttctcagcgatgttacgcgacgaaattggcggcaaagctgtgaatctcctcccatctgcggaataccaggatatttatggtatcgtcagcgacaaagttaacgagatgctgaaacaagatctgattaacggtacctctaccaccgtggaaacggtgactgataaaaagacaggcgaaattacccaacgcacgaaatacgggaccaaagttatggcacaatggtggttagaacacggtgtgaatcgtggcgtcacgaaacgcccggttatgactttggtgtatgggagcaaagagtttggattccgcgatcaagtgctgagtgacaccattcaaccggcgatcgataacggcaagggtctgatgtttctgaatccgaatcaggctgctggttacatggcgaaactgatctggaacgcagtgtccgggaccgtagtcgcagcagttgaggcgatgaactggctgaaaagtgcggcgaaattacttgctgctgaagtgaaggatgagaagacggatacagttctgcgtggccgctgcgcagtacattgggtgactcccgacggcttccctgtgtggcaggaatacaagaagcctattcaaacgcgcttgaacctgatgttcctcggtcagttccgcttacagcctaccattaacaccaacaaagatagcgagattgatgcacgcaaacaggtgtctggtatcgctcctaactttgtacacagcctggacggtaaccaccttcgtatgactgtagtgtgggcacacgagaagtacggaatcgaatcttttgcactgattcacgactccttcggtaccattccggctgacgctgcgaacctgttcaaagcagtgcgcgaaactttcgttgacacatatgagtcttgtgatgtactggctgatttctacgaccagattgctgaccagttgcacgagtctcaacgcgacaaaatgccagcacttccggctaaaggtaagttgaacctccgtgacatcttaaaatcggacttcgcgttcgcg

SEQ ID NO: 1626 - protein, 890 aa, synthetic construct
  REGION 1..890: note = Variant of RNA polymerase
MHHHHHHMNTINIAKNDFSDIELAAIPFNTLADHYGERLAREQLALEHESYEMGEARFRKMFERQLKAGEVADNAAAKPLITTLLPKMIARINDWFEEVKAKRGKRPTAFQFLQEIKPEAVAYITIKTTLACLTSADNTTVQAVASAIGRAIEDEARFGRIRDLEAKHFKKNVEEQLNKRVGHVYKKAFMQVVEHDMLSKGLLGGEAWSSWHKEDSIHVGVRCIEMLIESTGMVSLHRQNAGVVGADSETIELAPEYAEAIATRAGALAGISPMFQPCVVPPKPWTGITGGGYWAAGRKPLQLVRTRSLAALRRYEEVSMPEVIKAVNIAQNTAWRINKKVLDVANTITQWKHCPVADIPAMDRGEMPARPLDIDTNEIALKAWKKEASAFYRRDKARMSRRLSMEFMLSQANKFANYEAIWFPQNMDWRGRVYAVPMFNPQGNDMTKGLLTFAQEKPIGEDGFYWLKIHGANTAGVDKVPFPQRIKFVEDNHTNIMECAKAPLENTWWAEQDSPFCFLAFCFEYAGVINSGLSYNCSLPLAFDGSCSGLQHFSAMLRDEIGGKAVNLLPSAEYQDIYGIVSDKVNEMLKQDLINGTSTTVETVTDKKTGEITQRTKYGTKVMAQWWLEHGVNRGVTKRPVMTLVYGSKEFGFRDQVLSDTIQPAIDNGKGLMFLNPNQAAGYMAKLIWNAVSGTVVAAVEAMNWLKSAAKLLAAEVKDEKTDTVLRGRCAVHWVTPDGFPVWQEYKKPIQTRLNLMFLGQFRLQPTINTNKDSEIDARKQVSGIAPNFVHSLDGNHLRMTVVWAHEKYGIESFALIHDSFGTIPADAANLFKAVRETFVDTYESCDVLADFYDQIADQLHESQRDKMPALPAKGKLNLRDILKSDFAFA

SEQ ID NO: 1627 - DNA, 2670 bp, synthetic construct
  misc_feature 1..2670: note = Variant of RNA polymerase
  source 1..2670: mol_type = other DNA
atgcaccatcaccatcaccatatgaacacgattaacattgctaagaacgacttctctgacatcgaactggctgctatcccgttcaacactctggctgaccattacggtgagcgtttagctcgcgaacagttggcccttgagcatgagtcttacgagatgggtgaagcacgcttccgcaagatgtttgagcgtcaacttaaagctggtgaggttgcggataacgctgccgccaagcctctcatcactaccctactccctaagatgattgcacgcatcaacgactggtttgaggaagtgaaagctaagcgcggcaagcgcccgacagccttccagttcctgcaagaaatcaagccggaagccgtagcgtacatcaccattaagaccactctggcttgcctaaccagtgcggacaatacaaccgttcaggctgtagcaagcgcaatcggtcgggccattgaggacgaggctcgcttcggtcgtatccgtgaccttgaagctaagcacttcaagaagaacgttgaggaacaactcaacaagcgcgtagggcacgtctacaagaaagcatttatgcaagttgtcgagcacgacatgctctctaagggtctactcggtggcgaggcgtggtcttcgtggcataaggaagactctattcatgtaggagtacgctgcatcgagatgctcattgagtcaaccggaatggttagcttacaccgccaaaatgctggcgtagtgggtgcagactctgagactatcgaactcgcacctgaatacgctgaggctatcgcaacccgtgcaggtgcgctggctggcatctctccgatgttccaaccttgcgtagttcctcctaagccgtggactggcattactggtggtggctattgggctgcggggcgcaaacccctgcagttagtacgtactcgcagtctggcgatgcttcgccgctatgaagaagtgtcgatgccggaggtcatcaaagcagtcaacattgcgcagaatacagcatggcgtattaacaagaaagttctcgacgtagcgaataccatcacccaatggcagcactgtccagtcgcggatgtgcctgcgatggatcgtggcgaaatgccagctcgtccgttggacatcgataccaacgagattgcacttaaagcgtggaagaaagaagcttccgcgttctaccgcaaagacaaagcacgcatgagccgtcgtctgtcgatggagtttatgttatctcaggcgaacaagtttgcgaattatgaggcaatctggtttccgcaaaacatggattggcgtgggcgcgtgtacgctgtcccgatgttcaatcctcagggcaacgatatgacgaaaggcctgctgacctttgcgcaggagaaacccattggtgaagacggcttctattggctcaagattcatggcgcaaatacagctggagtggataaagtaccgtttccacaacgcatcaaatttgttgaggataaccatacgaatattatggaatgcgcgaaagcaccgctggaaaacacttggtgggcggaacaggactcgccgttctgctttctggcgttctgctttgagtatgctggcgtcatcaatagtggtctgtcgtacaactgtagcttgcctctggcatttgatggtagttgctccggcctgcaacatttctcagcgatgttacgcgacgaaattggcggcaaagctgtgaatctcctcccatctgcggaataccaggatatttatcgtatcgtcagcgacaaagttaacgagatgctgaaacaagatctgattaacggtacctctaccaccgtggaaacggtgactgataaaaagacaggcgaaattacccaacgcacgaaatacgggaccaaagttatggcacagtggtggttagaacacggtgtgaatcgtggcgtcacgaaacgcccggttatgactttggtgtatgggagcaaagagtttggattccgcgatcaagtgctgagtgacaccattcaaccggcgatcgataacggcaagggtgacatgtttctgaatccgaatcaggctgctggttacatggcgaaactgatctggaacgcagtgtccgggaccgtagtcgcagcagttgaggcgatgaactggctgaaaagtgcggcgaaattacttgctgctgaagtgaaggatgagaagacggatacagttctgcgtggccgctgcgcagtacattgggtgactcccgacggcttccctgtgtggcaggaatacaagaagcctattcaaacgcgcttgaacctgatgttcctcggtcagttccgcttacagcctaccattaacaccaacaaagatagcgagattgatgcacgcaaacaggtgtctggtatcgctcctaactttgtacacagcctggacggtaaccaccttcgtatgactgtagtgtgggcacacgagaagtacggaatcgaatcttttgcactgattcacgactccttcggtaccattccggctgacgctgcgaacctgttcaaagcagtgcgcgaaactttcgttgacacatatgagtcttgtgatgtactggctgatttctacgaccagattgctgaccagttgcacgagtctcaacgcgacaaaatgccagcacttccggctaaaggtaagttgaacctccgtgacatcttaaaatcggacttcgcgttcgcg

SEQ ID NO: 1628 - protein, 890 aa, synthetic construct
  REGION 1..890: note = Variant of RNA polymerase
MHHHHHHMNTINIAKNDFSDIELAAIPFNTLADHYGERLAREQLALEHESYEMGEARFRKMFERQLKAGEVADNAAAKPLITTLLPKMIARINDWFEEVKAKRGKRPTAFQFLQEIKPEAVAYITIKTTLACLTSADNTTVQAVASAIGRAIEDEARFGRIRDLEAKHFKKNVEEQLNKRVGHVYKKAFMQVVEHDMLSKGLLGGEAWSSWHKEDSIHVGVRCIEMLIESTGMVSLHRQNAGVVGADSETIELAPEYAEAIATRAGALAGISPMFQPCVVPPKPWTGITGGGYWAAGRKPLQLVRTRSLAMLRRYEEVSMPEVIKAVNIAQNTAWRINKKVLDVANTITQWQHCPVADVPAMDRGEMPARPLDIDTNEIALKAWKKEASAFYRKDKARMSRRLSMEFMLSQANKFANYEAIWFPQNMDWRGRVYAVPMFNPQGNDMTKGLLTFAQEKPIGEDGFYWLKIHGANTAGVDKVPFPQRIKFVEDNHTNIMECAKAPLENTWWAEQDSPFCFLAFCFEYAGVINSGLSYNCSLPLAFDGSCSGLQHFSAMLRDEIGGKAVNLLPSAEYQDIYRIVSDKVNEMLKQDLINGTSTTVETVTDKKTGEITQRTKYGTKVMAQWWLEHGVNRGVTKRPVMTLVYGSKEFGFRDQVLSDTIQPAIDNGKGDMFLNPNQAAGYMAKLIWNAVSGTVVAAVEAMNWLKSAAKLLAAEVKDEKTDTVLRGRCAVHWVTPDGFPVWQEYKKPIQTRLNLMFLGQFRLQPTINTNKDSEIDARKQVSGIAPNFVHSLDGNHLRMTVVWAHEKYGIESFALIHDSFGTIPADAANLFKAVRETFVDTYESCDVLADFYDQIADQLHESQRDKMPALPAKGKLNLRDILKSDFAFA

SEQ ID NO: 1629 - DNA, 2670 bp, synthetic construct
  misc_feature 1..2670: note = Variant of RNA polymerase
  source 1..2670: mol_type = other DNA
atgcaccatcaccatcaccatatgaacacgattaacattgctaagaacgacttctctgacatcgaactggctgctatcccgttcaacactctggctgaccattacggtgagcgtttagctcgcgaacagttggcccttgagcatgagtcttacgagatgggtgaagcacgcttccgcaagatgtttgagcgtcaacttaaagctggtgaggttgcggataacgctgccgccaagcctctcatcactaccctactccctaagatgattgcacgcatcaacgactggtttgaggaagtgaaagctaagcgcggcaagcgcccgacagccttccagttcctgcaagaaatcaagccggaagccgtagcgtacatcaccattaagaccactctggcttgcctaaccagtgcggacaatacaaccgttcaggctgtagcaagcgcaatcggtcgggccattgaggacgaggctcgcttcggtcgtatccgtgaccttgaagctaagcacttcaagaagaacgttgaggaacaactcaacaagcgcgtagggcacgtctacaagaaagcatttatgcaagttgtcgagcacgacatgctctctaagggtctactcggtggcgaggcgtggtcttcgtggcataaggaagactctattcatgtaggagtacgctgcatcgagatgctcattgagtcaaccggaatggttagcttacaccgccaaaatgctggcgtagtgggtgcagactctgagactatcgaactcgcacctgaatacgctgaggctatcgcaacccgtgcaggtgcgctggctggcatctctccgatgttccaaccttgcgtagttcctcctaagccgtggactggcattactggtggtggctattgggctgcggggcgcaaacccctgcagttagtacgtactcgcagtctggcggcgcttcgccgctatgaagaagtgtcgatgccggaggtcatcaaagcagtcaacattgcgcagaatacagcatggcgtattaacaagaaagttctcgacgtagcgaataccatcacccaatggcagcactgtccagtcgccgatattcctgcgatggatcgtggcgaaatgccagctaagccgttggacatcgataccaacgagattgcacttaaagcgtggaagaaagaagcttccgcgttctaccgcaaagacaaagcacgcatgagccgtcgtctgtcgatggagtttatgttatctcaggcgaacaagtttgcgaattatgaggcaatctggtttccgcaaaacatggattggcgtgggcgcgtgtacgctgtcccgatgttcaatcctcagggcaacgatatgacgaaaggcctgctgacctttgcgcaggagaaacccattggtgaagacggcttctattggctcaagattcatggcgcaaatacagctggagtggataaagtaccgtttccacaacgcatcaaatttgttgaggataaccatacgaatattatggaatgcgcgaaagcaccgctggaaaacacttggtgggcggaacaggactcgccgttctgctttctggcgttctgctttgagtatgctggcgtcatcaatagtggtctgtcgtacaactgtagcttgcctctggcatttgatggtagttgctccggcctgcaacatttctcagcgatgttacgcgacgaaattggcggcaaagctgtgaatctcctcccatctgcggaataccaggatatttatggtatcgtcagcgacaaagttaacgagatgctgaaacaagatctgattaacggtacctctaccaccgtggaaacggtgactgataaaaagacaggcgaaattacccaacgcacgaaatacgggaccaaagttatggcacagtggtggttagaacacggtgtgaatcgtggcgtcacgaaacgcccggttatgactttggtgtatgggagcaaagagtttggattccgcgatcaagtgctgagtgacaccattcaaccggcgatcgataacggcaagggtgacatgtttctgaatccgaatcaggctgctggttacatggcgaaactgatctggaacgcagtgtccgggaccgtagtcgcagcagttgaggcgatgaactggctgaaaagtgcggcgaaattacttgctgctgaagtgaaggatgagaagacggatacagttctgcgtggccgctgcgcagtacattgggtgactcccgacggcttccctgtgtggcaggaatacaagaagcctattcaaacgcgcttgaacctgatgttcctcggtcagttccgcttacagcctaccattaacaccaacaaagatagcgagattgatgcacgcaaacaggtgtctggtatcgctcctaactttgtacacagcctggacggtaaccaccttcgtatgactgtagtgtgggcacacgagaagtacggaatcgaatcttttgcactgattcacgactccttcggtaccattccggctgacgctgcgaacctgttcaaagcagtgcgcgaaactttcgttgacacatatgagtcttgtgatgtactggctgatttctacgaccagattgctgaccagttgcacgagtctcaacgcgacaaaatgccagcacttccggctaaaggtaagttgaacctccgtgacatcttaaaatcggacttcgcgttcgcg

SEQ ID NO: 1630 - protein, 890 aa, synthetic construct
  REGION 1..890: note = Variant of RNA polymerase
MHHHHHHMNTINIAKNDFSDIELAAIPFNTLADHYGERLAREQLALEHESYEMGEARFRKMFERQLKAGEVADNAAAKPLITTLLPKMIARINDWFEEVKAKRGKRPTAFQFLQEIKPEAVAYITIKTTLACLTSADNTTVQAVASAIGRAIEDEARFGRIRDLEAKHFKKNVEEQLNKRVGHVYKKAFMQVVEHDMLSKGLLGGEAWSSWHKEDSIHVGVRCIEMLIESTGMVSLHRQNAGVVGADSETIELAPEYAEAIATRAGALAGISPMFQPCVVPPKPWTGITGGGYWAAGRKPLQLVRTRSLAALRRYEEVSMPEVIKAVNIAQNTAWRINKKVLDVANTITQWQHCPVADIPAMDRGEMPAKPLDIDTNEIALKAWKKEASAFYRKDKARMSRRLSMEFMLSQANKFANYEAIWFPQNMDWRGRVYAVPMFNPQGNDMTKGLLTFAQEKPIGEDGFYWLKIHGANTAGVDKVPFPQRIKFVEDNHTNIMECAKAPLENTWWAEQDSPFCFLAFCFEYAGVINSGLSYNCSLPLAFDGSCSGLQHFSAMLRDEIGGKAVNLLPSAEYQDIYGIVSDKVNEMLKQDLINGTSTTVETVTDKKTGEITQRTKYGTKVMAQWWLEHGVNRGVTKRPVMTLVYGSKEFGFRDQVLSDTIQPAIDNGKGDMFLNPNQAAGYMAKLIWNAVSGTVVAAVEAMNWLKSAAKLLAAEVKDEKTDTVLRGRCAVHWVTPDGFPVWQEYKKPIQTRLNLMFLGQFRLQPTINTNKDSEIDARKQVSGIAPNFVHSLDGNHLRMTVVWAHEKYGIESFALIHDSFGTIPADAANLFKAVRETFVDTYESCDVLADFYDQIADQLHESQRDKMPALPAKGKLNLRDILKSDFAFA

SEQ ID NO: 1631 - DNA, 2670 bp, synthetic construct
  misc_feature 1..2670: note = Variant of RNA polymerase
  source 1..2670: mol_type = other DNA
atgcaccatcaccatcaccatatgaacacgattaacattgctaagaacgacttctctgacatcgaactggctgctatcccgttcaacactctggctgaccattacggtgagcgtttagctcgcgaacagttggcccttgagcatgagtcttacgagatgggtgaagcacgcttccgcaagatgtttgagcgtcaacttaaagctggtgaggttgcggataacgctgccgccaagcctctcatcactaccctactccctaagatgattgcacgcatcaacgactggtttgaggaagtgaaagctaagcgcggcaagcgcccgacagccttccagttcctgcaagaaatcaagccggaagccgtagcgtacatcaccattaagaccactctggcttgcctaaccagtgcggacaatacaaccgttcaggctgtagcaagcgcaatcggtcgggccattgaggacgaggctcgcttcggtcgtatccgtgaccttgaagctaagcacttcaagaagaacgttgaggaacaactcaacaagcgcgtagggcacgtctacaagaaagcatttatgcaagttgtcgagcacgacatgctctctaagggtctactcggtggcgaggcgtggtcttcgtggcataaggaagactctattcatgtaggagtacgctgcatcgagatgctcattgagtcaaccggaatggttagcttacaccgccaaaatgctggcgtagtgggtgcagactctgagactatcgaactcgcacctgaatacgctgaggctatcgcaacccgtgcaggtgcgctggctggcatctctccgatgttccaaccttgcgtagttcctcctaagccgtggactggcattactggtggtggctattgggctgcggggcgcaaacccctgcagttagtacgtactcgcagtctggcggcgcttcgccgctatgaagaagtgtcgatgccggaggtcatcaaagcagtcaacattgcgcagaatacagcatggcgtattaacaagaaagttctcgacgtagcgaataccatcacccaatggcagcactgtccagtcgcggatgtgcctgcgatggatcgtggcgaaatgccagctcgtccgttggacatcgataccaacgagattgcacttaaagcgtggaagaaagaagcttccgcgttctaccgcaaagacaaagcacgcatgagccgtcgtctgtcgatggagtttatgttatctcaggcgaacaagtttgcgaattatgaggcaatctggtttccgcaaaacatggattggcgtgggcgcgtgtacgctgtcccgatgttcaatcctcagggcaacgatatgacgaaaggcctgctgacctttgcgcaggagaaacccattggtgaagacggcttctattggctcaagattcatggcgcaaatacagctggagtggataaagtaccgtttccacaacgcatcaaatttgttgaggataaccatacgaatattatggaatgcgcgaaagcaccgctggaaaacacttggtgggcggaacaggactcgccgttctgctttctggcgttctgctttgagtatgctggcgtcatcaatagtggtctgtcgtacaactgtagcttgcctctggcatttgatggtagttgctccggcctgcaacatttctcagcgatgttacgcgacgaaattggcggcaaagctgtgaatctcctcccatctgcggaataccaggatatttatcgtatcgtcagcgacaaagttaacgagatgctgaaacaagatctgattaacggtacctctaccaccgtggaaacggtgactgataaaaagacaggcgaaattacccaacgcacgaaatacgggaccaaagttatggcacagtggtggttagaacacggtgtgaatcgtggcgtcacgaaacgcccggttatgactttggtgtatgggagcctggagtttggattccgcgatcaagtgctgagtgacaccattcaaccggcgatcgataacggcaagggtgacatgtttctgaatccgaatcaggctgctggttacatggcgaaactgatctggaacgcagtgtccgggaccgtagtcgcagcagttgaggcgatgaactggctgaaaagtgcggcgaaattacttgctgctgaagtgaaggatgagaagacggatacagttctgcgtggccgctgcgcagtacattgggtgactcccgacggcttccctgtgtggcaggaatacaagaagcctattcaaacgcgcttgaacctgatgttcctcggtcagttccgcttacagcctaccattaacaccaacaaagatagcgagattgatgcacgcaaacaggtgtctggtatcgctcctaactttgtacacagcctggacggtaaccaccttcgtatgactgtagtgtgggcacacgagaagtacggaatcgaatcttttgcactgattcacgactccttcggtaccattccggctgacgctgcgaacctgttcaaagcagtgcgcgaaactttcgttgacacatatgagtcttgtgatgtactggctgatttctacgaccagattgctgaccagttgcacgagtctcaacgcgacaaaatgccagcacttccggctaaaggtaagttgaacctccgtgacatcttaaaatcggacttcgcgttcgcg

SEQ ID NO: 1632 - protein, 890 aa, synthetic construct
  REGION 1..890: note = Variant of RNA polymerase
MHHHHHHMNTINIAKNDFSDIELAAIPFNTLADHYGERLAREQLALEHESYEMGEARFRKMFERQLKAGEVADNAAAKPLITTLLPKMIARINDWFEEVKAKRGKRPTAFQFLQEIKPEAVAYITIKTTLACLTSADNTTVQAVASAIGRAIEDEARFGRIRDLEAKHFKKNVEEQLNKRVGHVYKKAFMQVVEHDMLSKGLLGGEAWSSWHKEDSIHVGVRCIEMLIESTGMVSLHRQNAGVVGADSETIELAPEYAEAIATRAGALAGISPMFQPCVVPPKPWTGITGGGYWAAGRKPLQLVRTRSLAALRRYEEVSMPEVIKAVNIAQNTAWRINKKVLDVANTITQWQHCPVADVPAMDRGEMPARPLDIDTNEIALKAWKKEASAFYRKDKARMSRRLSMEFMLSQANKFANYEAIWFPQNMDWRGRVYAVPMFNPQGNDMTKGLLTFAQEKPIGEDGFYWLKIHGANTAGVDKVPFPQRIKFVEDNHTNIMECAKAPLENTWWAEQDSPFCFLAFCFEYAGVINSGLSYNCSLPLAFDGSCSGLQHFSAMLRDEIGGKAVNLLPSAEYQDIYRIVSDKVNEMLKQDLINGTSTTVETVTDKKTGEITQRTKYGTKVMAQWWLEHGVNRGVTKRPVMTLVYGSLEFGFRDQVLSDTIQPAIDNGKGDMFLNPNQAAGYMAKLIWNAVSGTVVAAVEAMNWLKSAAKLLAAEVKDEKTDTVLRGRCAVHWVTPDGFPVWQEYKKPIQTRLNLMFLGQFRLQPTINTNKDSEIDARKQVSGIAPNFVHSLDGNHLRMTVVWAHEKYGIESFALIHDSFGTIPADAANLFKAVRETFVDTYESCDVLADFYDQIADQLHESQRDKMPALPAKGKLNLRDILKSDFAFA

SEQ ID NO: 1633 - DNA, 2670 bp, synthetic construct
  misc_feature 1..2670: note = Variant of RNA polymerase
  source 1..2670: mol_type = other DNA
atgcaccatcaccatcaccatatgaacacgattaacattgctaagaacgacttctctgacatcgaactggctgctatcccgttcaacactctggctgaccattacggtgagcgtttagctcgcgaacagttggcccttgagcatgagtcttacgagatgggtgaagcacgcttccgcaagatgtttgagcgtcaacttaaagctggtgaggttgcggataacgctgccgccaagcctctcatcactaccctactccctaagatgattgcacgcatcaacgactggtttgaggaagtgaaagctaagcgcggcaagcgcccgacagccttccagttcctgcaagaaatcaagccggaagccgtagcgtacatcaccattaagaccactctggcttgcctaaccagtgcggacaatacaaccgttcaggctgtagcaagcgcaatcggtcgggccattgaggacgaggctcgcttcggtcgtatccgtgaccttgaagctaagcacttcaagaagaacgttgaggaacaactcaacaagcgcgtagggcacgtctacaagaaagcatttatgcaagttgtcgagcacgacatgctctctaagggtctactcggtggcgaggcgtggtcttcgtggcataaggaagactctattcatgtaggagtacgctgcatcgagatgctcattgagtcaaccggaatggttagcttacaccgccaaaatgctggcgtagtgggtgcagactctgagactatcgaactcgcacctgaatacgctgaggctatcgcaacccgtgcaggtgcgctggctggcatctctccgatgttccaaccttgcgtagttcctcctaagccgtggactggcattactggtggtggctattgggctgcggggcgcaaacccctgcagttagtacgtactcgcagtctggcggcgcttcgccgctatgaagaagtgtcgatgccggaggtcatcaaagcagtcaacattgcgcagaatacagcatggcgtattaacaagaaagttctcgacgtagcgaataccatcacccaatggcagcactgtccagtcgcggatgtgcctgcgatggatcgtggcgaaatgccagctcgtccgttggacatcgataccaacgagattgcacttaaagcgtggaagaaagaagcttccgcgttctaccgcaaagacaaagcacgcatgagccgtcgtctgtcgatggagtttatgttatctcaggcgaacaagtttgcgaattatgaggcaatctggtttccgcaaaacatggattggcgtgggcgcgtgtacgctgtcccgatgttcaatcctcagggcaacgatatgacgaaaggcctgctgacctttgcgcaggagaaacccattggtgaagacggcttctattggctcaagattcatggcgcaaatacagctggagtggataaagtaccgtttccacaacgcatcaaatttattgaggataaccatacgaatattatggaatgcgcgaaagcaccgctggaaaacacttggtgggcggaacaggactcgccgttctgctttctggcgttctgctttgagtatgctggcgtcatcaatagtggtctgtcgtacaactgtagcttgcctctggcatttgatggtagttgctccggcctgcaacatttctcagcgatgttacgcgacgaaattggcggcaaagctgtgaatctcctcccatctgcggaataccaggatatttatcgtatcgtcagcgacaaagttaacgagatgctgaaacaagatctgattaacggtacctctaccaccgtggaaacggtgactgataaaaagacaggcgaaattacccaacgcacgaaatacgggaccaaagttatggcacagtggtggttagaacacggtgtgaatcgtggcgtcacgaaacgcccggttatgactttggtgtatgggagcaaagagtttggattccgcgatcaagtgctgagtgacaccattcaaccggcgatcgataacggcaagggtgacatgtttctgaatccgaatcaggctgctggttacatggcgaaactgatctggaacgcagtgtccgggaccgtagtcgcagcagttgaggcgatgaactggctgaaaagtgcggcgaaattacttgctgctgaagtgaaggatgagaagacggatacagttctgcgtggccgctgcgcagtacattgggtgactcccgacggcttccctgtgtggcaggaatacaagaagcctattcaaacgcgcttgaacctgatgttcctcggtcagttccgcttacagcctaccattaacaccaacaaagatagcgagattgatgcacgcaaacaggtgtctggtatcgctcctaactttgtacacagcctggacggtaaccaccttcgtatgactgtagtgtgggcacacgagaagtacggaatcgaatcttttgcactgattcacgactccttcggtaccattccggctgacgctgcgaacctgttcaaagcagtgcgcgaaactttcgttgacacatatgagtcttgtgatgtactggctgatttctacgaccagattgctgaccagttgcacgagtctcaacgcgacaaaatgccagcacttccggctaaaggtaagttgaacctccgtgacatcttaaaatcggacttcgcgttcgcg

SEQ ID NO: 1634 - protein, 890 aa, synthetic construct
  REGION 1..890: note = Variant of RNA polymerase
MHHHHHHMNTINIAKNDFSDIELAAIPFNTLADHYGERLAREQLALEHESYEMGEARFRKMFERQLKAGEVADNAAAKPLITTLLPKMIARINDWFEEVKAKRGKRPTAFQFLQEIKPEAVAYITIKTTLACLTSADNTTVQAVASAIGRAIEDEARFGRIRDLEAKHFKKNVEEQLNKRVGHVYKKAFMQVVEHDMLSKGLLGGEAWSSWHKEDSIHVGVRCIEMLIESTGMVSLHRQNAGVVGADSETIELAPEYAEAIATRAGALAGISPMFQPCVVPPKPWTGITGGGYWAAGRKPLQLVRTRSLAALRRYEEVSMPEVIKAVNIAQNTAWRINKKVLDVANTITQWQHCPVADVPAMDRGEMPARPLDIDTNEIALKAWKKEASAFYRKDKARMSRRLSMEFMLSQANKFANYEAIWFPQNMDWRGRVYAVPMFNPQGNDMTKGLLTFAQEKPIGEDGFYWLKIHGANTAGVDKVPFPQRIKFIEDNHTNIMECAKAPLENTWWAEQDSPFCFLAFCFEYAGVINSGLSYNCSLPLAFDGSCSGLQHFSAMLRDEIGGKAVNLLPSAEYQDIYRIVSDKVNEMLKQDLINGTSTTVETVTDKKTGEITQRTKYGTKVMAQWWLEHGVNRGVTKRPVMTLVYGSKEFGFRDQVLSDTIQPAIDNGKGDMFLNPNQAAGYMAKLIWNAVSGTVVAAVEAMNWLKSAAKLLAAEVKDEKTDTVLRGRCAVHWVTPDGFPVWQEYKKPIQTRLNLMFLGQFRLQPTINTNKDSEIDARKQVSGIAPNFVHSLDGNHLRMTVVWAHEKYGIESFALIHDSFGTIPADAANLFKAVRETFVDTYESCDVLADFYDQIADQLHESQRDKMPALPAKGKLNLRDILKSDFAFA

SEQ ID NO: 1635 - DNA, 2670 bp, synthetic construct
  misc_feature 1..2670: note = Variant of RNA polymerase
  source 1..2670: mol_type = other DNA
atgcaccatcaccatcaccatatgaacacgattaacattgctaagaacgacttctctgacatcgaactggctgctatcccgttcaacactctggctgaccattacggtgagcgtttagctcgcgaacagttggcccttgagcatgagtcttacgagatgggtgaagcacgcttccgcaagatgtttgagcgtcaacttaaagctggtgaggttgcggataacgctgccgccaagcctctcatcactaccctactccctaagatgattgcacgcatcaacgactggtttgaggaagtgaaagctaagcgcggcaagcgcccgacagccttccagttcctgcaagaaatcaagccggaagccgtagcgtacatcaccattaagaccactctggcttgcctaaccagtgcggacaatacaaccgttcaggctgtagcaagcgcaatcggtcgggccattgaggacgaggctcgcttcggtcgtatccgtgaccttgaagctaagcacttcaagaagaacgttgaggaacaactcaacaagcgcgtagggcacgtctacaagaaagcatttatgcaagttgtcgagcacgacatgctctctaagggtctactcggtggcgaggcgtggtcttcgtggcataaggaagactctattcatgtaggagtacgctgcatcgagatgctcattgagtcaaccggaatggttagcttacaccgccaaaatgctggcgtagtgggtgcagactctgagactatcgaactcgcacctgaatacgctgaggctatcgcaacccgtgcaggtgcgctggctggcatctctccgatgttccaaccttgcgtagttcctcctaagccgtggactggcattactggtggtggctattgggctgcggggcgcaaacccctgcagttagtacgtactcgcagtctggcggcgcttcgccgctatgaagaagtgtcgatgccggaggtcatcaaagcagtcaacattgcgcagaatacagcatggcgtattaacaagaaagttctcgacgtagcgaataccatcacccaatggcagcactgtccagtcgccgatgttcctgcgatggatcgtggcgaaatgccagctcgtccgttggacatcgataccaacgagattgcacttaaagcgtggaagaaagaagcttccgcgttctaccgcaaagacaaagcacgcatgagccgtcgtctgtcgatggagtttatgttatctcaggcgaacaagtttgcgaattatgaggcaatctggtttccgcaaaacatggattggcgtgggcgcgtgtacgctgtcccgatgttcaatcctcagggcaacgatatgacgaaaggcctgctgacctttgcgcaggagaaacccattggtgaagacggcttctattggctcaagattcatggcgcaaatacagctggagtggataaagtaccgtttccacaacgcatcaaatttgttgaggataaccatacgaatattatggaatgcgcgaaagcaccgctggaaaacacttggtgggcggaacaggactcgccgttctgctttctggcgttctgctttgagtatgctggcgtcatcaatagtggtctgtcgtacaactgtagcttgcctctggcatttgatggtagttgctccggcctgcaacatttctcagcgatgttacgcgacgaagttggcggcaaagctgtgaatctcctcccatctgcggaataccaggatatttatcgtatcgtcagcgacaaagttaacgagatgctgaaacaagatctgattaacggtacctctaccaccgtggaaacggtgactgataaaaagacaggcgaaattacccaacgcacgaaatacgggaccaaagttatggcacagtggtggttagaacacggtgtgaatcgtggcgtcacgaaacgcccggttatgactttggtgtatgggagcaaagagtttggattccgcgatcaagtgctgagtgacaccattcaaccggcgatcgataacggcaagggtgacatgtttctgaatccgaatcaggctgctggttacatggcgaaactgatctggaacgcagtgtccgggaccgtagtcgcagcagttgaggcgatgaactggctgaaaagtgcggcgaaattacttgctgctgaagtgaaggatgagaagacggatacagttctgcgtggccgctgcgcagtacattgggtgactcccgacggcttccctgtgtggcaggaatacaagaagcctattcaaacgcgcttgaacctgatgttcctcggtcagttccgcttacagcctaccattaacaccaacaaagatagcgagattgatgcacgcaaacaggtgtctggtatcgctcctaactttgtacacagcctggacggtaaccaccttcgtatgactgtagtgtgggcacacgagaagtacggaatcgaatcttttgcactgattcacgactccttcggtaccattccggctgacgctgcgaacctgttcaaagcagtgcgcgaaactttcgttgacacatatgagtcttgtgatgtactggctgatttctacgaccagattgctgaccagttgcacgagtctcaacgcgacaaaatgccagcacttccggctaaaggtaagttgaacctccgtgacatcttaaaatcggacttcgcgttcgcg

SEQ ID NO: 1636 - protein, 890 aa, synthetic construct
  REGION 1..890: note = Variant of RNA polymerase
MHHHHHHMNTINIAKNDFSDIELAAIPFNTLADHYGERLAREQLALEHESYEMGEARFRKMFERQLKAGEVADNAAAKPLITTLLPKMIARINDWFEEVKAKRGKRPTAFQFLQEIKPEAVAYITIKTTLACLTSADNTTVQAVASAIGRAIEDEARFGRIRDLEAKHFKKNVEEQLNKRVGHVYKKAFMQVVEHDMLSKGLLGGEAWSSWHKEDSIHVGVRCIEMLIESTGMVSLHRQNAGVVGADSETIELAPEYAEAIATRAGALAGISPMFQPCVVPPKPWTGITGGGYWAAGRKPLQLVRTRSLAALRRYEEVSMPEVIKAVNIAQNTAWRINKKVLDVANTITQWQHCPVADVPAMDRGEMPARPLDIDTNEIALKAWKKEASAFYRKDKARMSRRLSMEFMLSQANKFANYEAIWFPQNMDWRGRVYAVPMFNPQGNDMTKGLLTFAQEKPIGEDGFYWLKIHGANTAGVDKVPFPQRIKFVEDNHTNIMECAKAPLENTWWAEQDSPFCFLAFCFEYAGVINSGLSYNCSLPLAFDGSCSGLQHFSAMLRDEVGGKAVNLLPSAEYQDIYRIVSDKVNEMLKQDLINGTSTTVETVTDKKTGEITQRTKYGTKVMAQWWLEHGVNRGVTKRPVMTLVYGSKEFGFRDQVLSDTIQPAIDNGKGDMFLNPNQAAGYMAKLIWNAVSGTVVAAVEAMNWLKSAAKLLAAEVKDEKTDTVLRGRCAVHWVTPDGFPVWQEYKKPIQTRLNLMFLGQFRLQPTINTNKDSEIDARKQVSGIAPNFVHSLDGNHLRMTVVWAHEKYGIESFALIHDSFGTIPADAANLFKAVRETFVDTYESCDVLADFYDQIADQLHESQRDKMPALPAKGKLNLRDILKSDFAFA

SEQ ID NO: 1637 - DNA, 2670 bp, synthetic construct
  misc_feature 1..2670: note = Variant of RNA polymerase
  source 1..2670: mol_type = other DNA
atgcaccatcaccatcaccatatgaacacgattaacattgctaagaacgacttctctgacatcgaactggctgctatcccgttcaacactctggctgaccattacggtgagcgtttagctcgcgaacagttggcccttgagcatgagtcttacgagatgggtgaagcacgcttccgcaagatgtttgagcgtcaacttaaagctggtgaggttgcggataacgctgccgccaagcctctcatcactaccctactccctaagatgattgcacgcatcaacgactggtttgaggaagtgaaagctaagcgcggcaagcgcccgacagccttccagttcctgcaagaaatcaagccggaagccgtagcgtacatcaccattaagaccactctggcttgcctaaccagtgcggacaatacaaccgttcaggctgtagcaagcgcaatcggtcgggccattgaggacgaggctcgcttcggtcgtatccgtgaccttgaagctaagcacttcaagaagaacgttgaggaacaactcaacaagcgcgtagggcacgtctacaagaaagcatttatgcaagttgtcgagcacgacatgctctctaagggtctactcggtggcgaggcgtggtcttcgtggcataaggaagactctattcatgtaggagtacgctgcatcgagatgctcattgagtcaaccggaatggttagcttacaccgccaaaatgctggcgtagtgggtgcagactctgagactatcgaactcgcacctgaatacgctgaggctatcgcaacccgtgcaggtgcgctggctggcatctctccgatgttccaaccttgcgtagttcctcctaagccgtggactggcattactggtggtggctattgggctgcggggcgcaaacccctgcagttagtacgtactcgcagtctggcggcgcttcgccgctatgaagaagtgtcgatgccggaggtcatcaaagcagtcaacattgcgcagaatacagcatggcgtattaacaagaaagttctcgacgtagcgaataccatcacccaatggcagcactgtccagtcgccgatgttcctgcgatggatcgtggcgaaatgccagctaagccgttggacatcgataccaaccctattgcacttaaagcgtggaagaaagaagcttccgcgttctaccgcaaagacaaagcacgcatgagccgtcgtctgtcgatggagtttatgttatctcaggcgaacaagtttgcgaattatgaggcaatctggtttccgcaaaacatggattggcgtgggcgcgtgtacgctgtcccgatgttcaatcctcagggcaacgatatgacgaaaggcctgctgacctttgcgcaggagaaacccattggtgaagacggcttctattggctcaagattcatggcgcaaatacagctggagtggataaagtaccgtttccacaacgcatcaaatttattgaggataaccatacgaatattatggaatgcgcgaaagcaccgctggaaaacacttggtgggcggaacaggactcgccgttctgctttctggcgttctgctttgagtatgctggcgtcatcaatagtggtctgtcgtacaactgtagcttgcctctggcatttgatggtagttgctccggcctgcaacatttctcagcgatgttacgcgacgaaattggcggcaaagctgtgaatctcctcccatctgcggaataccaggatatttatcgtatcgtcagcgacaaagttaacgagatgctgaaacaagatctgattaacggtacctctaccaccgtggaaacggtgactgataaaaagacaggcgaaattacccaacgcacgaaatacgggaccaaagttatggcacagtggtggttagaacacggtgtgaatcgtggcgtcacgaaacgcccggttatgactttggtgtatgggagcaaagagtttggattccgcgatcaagtgctgagtgacaccattcaaccggcgatcgataacggcaagggtgacatgtttctgaatccgaatcaggctgctggttacatggcgaaactgatctggaactcggtgtccgggaccgtagtcgcagcagttgaggcgatgaactggctgaaaagtgcggcgaaattacttgctgctgaagtgaaggatgagaagacggatacaattctgcgtggccgctgcgcagtacattgggtgactcccgacggcttccctgtgtggcaggaatacaagaagcctattcaaacgcgcttgaacctgatgttcctcggtcagttccgcttacagcctaccattaacaccaacaaagatagcgagattgatgcacgcaaacaggtgtctggtatcgctcctaactttgtacacagcctggacggtaaccaccttcgtatgactgtagtgtgggcacacgagaagtacggaatcgaatcttttgcactgattcacgactccttcggtaccattccggctgacgctgcgaacctgttcaaagcagtgcgcgaaactttcgttgacacatatgagtcttgtgatgtactggctgatttctacgaccagattgctgaccagttgcacgagtctcaacgcgacaaaatgccagcacttccggctaaaggtaagttgaacctccgtgacatcttaaaatcggacttcgcgttcgcg

SEQ ID NO: 1638 - protein, 890 aa, synthetic construct
  REGION 1..890: note = Variant of RNA polymerase
MHHHHHHMNTINIAKNDFSDIELAAIPFNTLADHYGERLAREQLALEHESYEMGEARFRKMFERQLKAGEVADNAAAKPLITTLLPKMIARINDWFEEVKAKRGKRPTAFQFLQEIKPEAVAYITIKTTLACLTSADNTTVQAVASAIGRAIEDEARFGRIRDLEAKHFKKNVEEQLNKRVGHVYKKAFMQVVEHDMLSKGLLGGEAWSSWHKEDSIHVGVRCIEMLIESTGMVSLHRQNAGVVGADSETIELAPEYAEAIATRAGALAGISPMFQPCVVPPKPWTGITGGGYWAAGRKPLQLVRTRSLAALRRYEEVSMPEVIKAVNIAQNTAWRINKKVLDVANTITQWQHCPVADVPAMDRGEMPAKPLDIDTNPIALKAWKKEASAFYRKDKARMSRRLSMEFMLSQANKFANYEAIWFPQNMDWRGRVYAVPMFNPQGNDMTKGLLTFAQEKPIGEDGFYWLKIHGANTAGVDKVPFPQRIKFIEDNHTNIMECAKAPLENTWWAEQDSPFCFLAFCFEYAGVINSGLSYNCSLPLAFDGSCSGLQHFSAMLRDEIGGKAVNLLPSAEYQDIYRIVSDKVNEMLKQDLINGTSTTVETVTDKKTGEITQRTKYGTKVMAQWWLEHGVNRGVTKRPVMTLVYGSKEFGFRDQVLSDTIQPAIDNGKGDMFLNPNQAAGYMAKLIWNSVSGTVVAAVEAMNWLKSAAKLLAAEVKDEKTDTILRGRCAVHWVTPDGFPVWQEYKKPIQTRLNLMFLGQFRLQPTINTNKDSEIDARKQVSGIAPNFVHSLDGNHLRMTVVWAHEKYGIESFALIHDSFGTIPADAANLFKAVRETFVDTYESCDVLADFYDQIADQLHESQRDKMPALPAKGKLNLRDILKSDFAFA

SEQ ID NO: 1639 - DNA, 2670 bp, synthetic construct
  misc_feature 1..2670: note = Variant of RNA polymerase
  source 1..2670: mol_type = other DNA
atgcaccatcaccatcaccatatgaacacgattaacattgctaagaacgacttctctgacatcgaactggctgctatcccgttcaacactctggctgaccattacggtgagcgtttagctcgcgaacagttggcccttgagcatgagtcttacgagatgggtgaagcacgcttccgcaagatgtttgagcgtcaacttaaagctggtgaggttgcggataacgctgccgccaagcctctcatcactaccctactccctaagatgattgcacgcatcaacgactggtttgaggaagtgaaagctaagcgcggcaagcgcccgacagccttccagttcctgcaagaaatcaagccggaagccgtagcgtacatcaccattaagaccactctggcttgcctaaccagtgcggacaatacaaccgttcaggctgtagcaagcgcaatcggtcgggccattgaggacgaggctcgcttcggtcgtatccgtgaccttgaagctaagcacttcaagaagaacgttgaggaacaactcaacaagcgcgtagggcacgtctacaagaaagcatttatgcaagttgtcgagcacgacatgctctctaagggtctactcggtggcgaggcgtggtcttcgtggcataaggaagactctattcatgtaggagtacgctgcatcgagatgctcattgagtcaaccggaatggttagcttacaccgccaaaatgctggcgtagtgggtgcagactctgagactatcgaactcgcacctgaatacgctgaggctatcgcaacccgtgcaggtgcgctggctggcatctctccgatgttccaaccttgcgtagttcctcctaagccgtggactggcattactggtggtggctattgggctgcggggcgcaaacccctgcagttagtacgtactcgcagtctggcggcgcttcgccgctatgaagaagtgtcgatgccggaggtcatcaaagcagtcaacattgcgcagaatacagcatggcgtattaacaagaaagttctcgacgtagcgaataccatcacccaatggcagcactgtccagtcgccgatgttcctgcgatggatcgtggcgaaatgccagctcgtccgttggacatcgataccaacgagattgcacttaaagcgtggaagaaagaagcttccgcgttctaccgccgcgacaaagcacgcatgagccgtcgtctgtcgatggagtttatgttatctcaggcgaacaagtttgcgaattatgaggcaatctggtttccgcaaaacatggattggcgtgggcgcgtgtacgctgtcccgatgttcaatcctcagggcaacgatatgacgaaaggcctgctgacctttgcgcaggagaaacccattggtgaagacggcttctattggctcaagattcatggcgcaaatacagctggagtggataaagtaccgtttccacaacgcatcaaatttattgaggataaccatacgaatattatggaatgcgcgaaagcaccgctggaaaacacttggtgggcggaacaggactcgccgttctgctttctggcgttctgctttgagtatgctggcgtcatcaatagtggtctgtcgtacaactgtagcttgcctctggcatttgatggtagttgctccggcctgcaacatttctcagcgatgttacgcgacgaaattggcggcaaagctgtgaatctcctcccatctgcggaataccaggatatttatggtatcgtcagcgacaaagttaacgagatgctgaaacaagatctgattaacggtacctctaccaccgtggaaacggtgactgataaaaagacaggcgaaattacccaacgcacgaaatacgggaccaaagttatggcagggtggtggttagaacacggtgtgaatcgtggcgtcacgaaacgcccggttatgactttggtgtatgggagcaaagagtttggattccgcgatcaagtgctgagtgacaccattcaaccggcgatcgataacggcaagggtgacatgtttctgaatccgaatcaggctgctggttacatggcgaaactgatctggaacgcagtgtccgggaccgtagtcgcagcagttgaggcgatgaactggctgaaaagtgcggcgaaattacttgctgctgaagtgaaggatgagaagacggatacagttctgcgtggccgctgcgcagtacattgggtgactcccgacggcttccctgtgtggcaggaatacaagaagcctattcaaacgcgcttgaacctgatgttcctcggtcagttccgcttacagcctaccattaacaccaacaaagatagcgagattgatgcacgcaaacaggtgtctggtatcgctcctaactttgtacacagcctggacggtaaccaccttcgtatgactgtagtgtgggcacacgagaagtacggaatcgaatcttttgcactgattcacgactccttcggtaccattccggctgacgctgcgaacctgttcaaagcagtgcgcgaaactttcgttgacacatatgagtcttgtgatgtactggctgatttctacgaccagattgctgaccagttgcacgagtctcaacgcgacaaaatgccagcacttccggctaaaggtaagttgaacctccgtgacatcttaaaatcggacttcgcgttcgcg

SEQ ID NO: 1640 - protein, 890 aa, synthetic construct
  REGION 1..890: note = Variant of RNA polymerase
MHHHHHHMNTINIAKNDFSDIELAAIPFNTLADHYGERLAREQLALEHESYEMGEARFRKMFERQLKAGEVADNAAAKPLITTLLPKMIARINDWFEEVKAKRGKRPTAFQFLQEIKPEAVAYITIKTTLACLTSADNTTVQAVASAIGRAIEDEARFGRIRDLEAKHFKKNVEEQLNKRVGHVYKKAFMQVVEHDMLSKGLLGGEAWSSWHKEDSIHVGVRCIEMLIESTGMVSLHRQNAGVVGADSETIELAPEYAEAIATRAGALAGISPMFQPCVVPPKPWTGITGGGYWAAGRKPLQLVRTRSLAALRRYEEVSMPEVIKAVNIAQNTAWRINKKVLDVANTITQWQHCPVADVPAMDRGEMPARPLDIDTNEIALKAWKKEASAFYRRDKARMSRRLSMEFMLSQANKFANYEAIWFPQNMDWRGRVYAVPMFNPQGNDMTKGLLTFAQEKPIGEDGFYWLKIHGANTAGVDKVPFPQRIKFIEDNHTNIMECAKAPLENTWWAEQDSPFCFLAFCFEYAGVINSGLSYNCSLPLAFDGSCSGLQHFSAMLRDEIGGKAVNLLPSAEYQDIYGIVSDKVNEMLKQDLINGTSTTVETVTDKKTGEITQRTKYGTKVMAGWWLEHGVNRGVTKRPVMTLVYGSKEFGFRDQVLSDTIQPAIDNGKGDMFLNPNQAAGYMAKLIWNAVSGTVVAAVEAMNWLKSAAKLLAAEVKDEKTDTVLRGRCAVHWVTPDGFPVWQEYKKPIQTRLNLMFLGQFRLQPTINTNKDSEIDARKQVSGIAPNFVHSLDGNHLRMTVVWAHEKYGIESFALIHDSFGTIPADAANLFKAVRETFVDTYESCDVLADFYDQIADQLHESQRDKMPALPAKGKLNLRDILKSDFAFA

SEQ ID NO: 1641 - DNA, 2670 bp, synthetic construct
  misc_feature 1..2670: note = Variant of RNA polymerase
  source 1..2670: mol_type = other DNA
atgcaccatcaccatcaccatatgaacacgattaacattgctaagaacgacttctctgacatcgaactggctgctatcccgttcaacactctggctgaccattacggtgagcgtttagctcgcgaacagttggcccttgagcatgagtcttacgagatgggtgaagcacgcttccgcaagatgtttgagcgtcaacttaaagctggtgaggttgcggataacgctgccgccaagcctctcatcactaccctactccctaagatgattgcacgcatcaacgactggtttgagggggtgaaagctaagcgcggcaagcgcccgacagccttccagttcctgcaagaaatcaagccggaagccgtagcgtacatcaccattaagaccactctggcttgcctaaccagtgcggacaatacaaccgttcaggctgtagcaagcgcaatcggtcgggccattgaggacgaggctcgcttcggtcgtatccgtgaccttgaagctaagcacttcaagaagaacgttgaggaacaactcaacaagcgcgtagggcacgtctacaagaaagcatttatgcaagttgtcgagcacgacatgctctctaagggtctactcggtggcgaggcgtggtcttcgtggcataaggaagactctattcatgtaggagtacgctgcatcgagatgctcattgagtcaaccggaatggttagcttacaccgccaaaatgctggcgtagtgggtgcagactctgagactatcgaactcgcacctgaatacgctgaggctatcgcaacccgtgcaggtgcgctggctggcatctctccgatgttccaaccttgcgtagttcctcctaagccgtggactggcattactggtggtggctattgggctgcggggcgcaaacccctgcagttagtacgtactcgcagtctggcggcgcttcgccgctatgaagaagtgtcgatgccggaggtcatcaaagcagtcaacattgcgcagaatacagcatggcgtattaacaagaaagttctcgacgtagcgaataccatcacccaatggcagcactgtccagtcgcggatgtgcctgcgatggatcgtggcgaaatgccagctcgtccgttggacatcgataccaacgagattgcacttaaagcgtggaagaaagaagcttccgcgttctaccgcaaagacaaagcacgcatgagccgtcgtctgtcgatggagtttatgttatctcaggcgaacaagtttgcgaattatgaggcaatctggtttccgcaaaacatggattggcgtgggcgcgtgtacgctgtcccgatgttcaatcctcagggcaacgatatgacgaaaggcctgctgacctttgcgcaggagaaacccattggtgaagacggcttctattggctcaagattcatggcgcaaatacagctggagtggataaagtaccgtttccacaacgcatcaaatttgttgaggataaccatacgaatattatggaatgcgcgaaagcaccgctggaaaacacttggtgggcggaacaggactcgccgttctgctttctggcgttctgctttgagtatgctggcgtcatcaatagtggtctgtcgtacaactgtagcttgcctctggcatttgatggtagttgctccggcctgcaacatttctcagcgatgttacgcgacgaaattggcggcaaagctgtgaatctcctcccatctgcggaataccaggatatttatcgtatcgtcagcgacaaagttaacgagatgctgaaacaagatctgattaacggtacctctaccaccgtggaaacggtgactgataaaaagacaggcgaaattacccaacgcacgaaatacgggaccaaagttatggcacagtggtggttagaacacggtgtgaatcgtggcgtcacgaaacgcccggttatgactttggtgtatgggagcaaagagtttggattccgcgatcaagtgctgagtgacaccattcaaccggcgatcgataacggcaagggtgacatgtttctgaatccgaatcaggctgctggttacatggcgaaactgatctggaacgcagtgtccgggaccgtagtcgcagcagttgaggcgatgaactggctgaaaagtgcggcgaaattacttgctgctgaagtgaaggatgagaagacggatacagttctgcgtggccgctgcgcagtacattgggtgactcccgacggcttccctgtgtggcaggaatacaagaagcctattcaaacgcgcttgaacctgatgttcctcggtcagttccgcttacagcctaccattaacaccaacaaagatagcgagattgatgcacgcaaacaggtgtctggtatcgctcctaactttgtacacagcctggacggtaaccaccttcgtatgactgtagtgtgggcacacgagaagtacggaatcgaatcttttgcactgattcacgactccttcggtaccattccggctgacgctgcgaacctgttcaaagcagtgcgcgaaactttcgttgacacatatgagtcttgtgatgtactggctgatttctacgaccagattgctgaccagttgcacgagtctcaacgcgacaaaatgccagcacttccggctaaaggtaagttgaacctccgtgacatcttaaaatcggacttcgcgttcgcg

SEQ ID NO: 1642 - protein, 890 aa, synthetic construct
  REGION 1..890: note = Variant of RNA polymerase
MHHHHHHMNTINIAKNDFSDIELAAIPFNTLADHYGERLAREQLALEHESYEMGEARFRKMFERQLKAGEVADNAAAKPLITTLLPKMIARINDWFEGVKAKRGKRPTAFQFLQEIKPEAVAYITIKTTLACLTSADNTTVQAVASAIGRAIEDEARFGRIRDLEAKHFKKNVEEQLNKRVGHVYKKAFMQVVEHDMLSKGLLGGEAWSSWHKEDSIHVGVRCIEMLIESTGMVSLHRQNAGVVGADSETIELAPEYAEAIATRAGALAGISPMFQPCVVPPKPWTGITGGGYWAAGRKPLQLVRTRSLAALRRYEEVSMPEVIKAVNIAQNTAWRINKKVLDVANTITQWQHCPVADVPAMDRGEMPARPLDIDTNEIALKAWKKEASAFYRKDKARMSRRLSMEFMLSQANKFANYEAIWFPQNMDWRGRVYAVPMFNPQGNDMTKGLLTFAQEKPIGEDGFYWLKIHGANTAGVDKVPFPQRIKFVEDNHTNIMECAKAPLENTWWAEQDSPFCFLAFCFEYAGVINSGLSYNCSLPLAFDGSCSGLQHFSAMLRDEIGGKAVNLLPSAEYQDIYRIVSDKVNEMLKQDLINGTSTTVETVTDKKTGEITQRTKYGTKVMAQWWLEHGVNRGVTKRPVMTLVYGSKEFGFRDQVLSDTIQPAIDNGKGDMFLNPNQAAGYMAKLIWNAVSGTVVAAVEAMNWLKSAAKLLAAEVKDEKTDTVLRGRCAVHWVTPDGFPVWQEYKKPIQTRLNLMFLGQFRLQPTINTNKDSEIDARKQVSGIAPNFVHSLDGNHLRMTVVWAHEKYGIESFALIHDSFGTIPADAANLFKAVRETFVDTYESCDVLADFYDQIADQLHESQRDKMPALPAKGKLNLRDILKSDFAFA

SEQ ID NO: 1643 - DNA, 2670 bp, synthetic construct
  misc_feature 1..2670: note = Variant of RNA polymerase
  source 1..2670: mol_type = other DNA
atgcaccatcaccatcaccatatgaacacgattaacattgctaagaacgacttctctgacatcgaactggctgctatcccgttcaacactctggctgaccattacggtgagcgtttagctcgcgaacagttggcccttgagcatgagtcttacgagatgggtgaagcacgcttccgcaagatgtttgagcgtcaacttaaagctggtgaggttgcggataacgctgccgccaagcctctcatcactaccctactccctaagatgattgcacgcatcaacgactggtttgaggaagtgaaagctaagcgcggcaagcgcccgacagccttccagttcctgcaagaaatcaagccggaagccgtagcgtacatcaccattaagaccactctggcttggctaaccagtgcggacaatacaaccgttcaggctgtagcaagcgcaatcggtcgggccattgaggacgaggctcgcttcggtcgtatccgtgaccttgaagctaagcacttcaagaagaacgttgaggaacaactcaacaagcgcgtagggcacgtctacaagaaagcatttatgcaagttgtcgagcacgacatgctctctaagggtctactcggtggcgaggcgtggtcttcgtggcataaggaagactctattcatgtaggagtacgctgcatcgagatgctcattgagtcaaccggaatggttagcttacaccgccaaaatgctggcgtagtgggtgcagactctgagactatcgaactcgcacctgaatacgctgaggctatcgcaacccgtgcaggtgcgctggctggcatctctccgatgttccaaccttgcgtagttcctcctaagccgtggactggcattactggtggtggctattgggctgcggggcgcaaacccctgcagttagtacgtactcgcagtctggcggcgcttcgccgctatgaagaagtgtcgatgccggaggtcatcaaagcagtcaacattgcgcagaatacagcatggcgtattaacaagaaagttctcgacgtagcgaataccatcacccaatggcagcactgtccagtcgcggatgtgcctgcgatggatcgtggcgaaatgccagctcgtccgttggacatcgataccaacgagattgcacttaaagcgtggaagaaagaagcttccgcgttctaccgcaaagacaaagcacgcatgagccgtcgtctgtcgatggagtttatgttatctcaggcgaacaagtttgcgaattatgaggcaatctggtttccgcaaaacatggattggcgtgggcgcgtgtacgctgtcccgatgttcaatcctcagggcaacgatatgacgaaaggcctgctgacctttgcgcaggagaaacccattggtgaagacggcttctattggctcaagattcatggcgcaaatacagctggagtggataaagtaccgtttccacaacgcatcaaatttgttgaggataaccatacgaatattatggaatgcgcgaaagcaccgctggaaaacacttggtgggcggaacaggactcgccgttctgctttctggcgttctgctttgagtatgctggcgtcatcaatagtggtctgtcgtacaactgtagcttgcctctggcatttgatggtagttgctccggcctgcaacatttctcagcgatgttacgcgacgaaattggcggcaaagctgtgaatctcctcccatctgcggaataccaggatatttatcgtatcgtcagcgacaaagttaacgagatgctgaaacaagatctgattaacggtacctctaccaccgtggaaacggtgactgataaaaagacaggcgaaattacccaacgcacgaaatacgggaccaaagttatggcacagtggtggttagaacacggtgtgaatcgtggcgtcacgaaacgcccggttatgactttggtgtatgggagcaaagagtttggattccgcgatcaagtgctgagtgacaccattcaaccggcgatcgataacggcaagggtgacatgtttctgaatccgaatcaggctgctggttacatggcgaaactgatctggaacgcagtgtccgggaccgtagtcgcagcagttgaggcgatgaactggctgaaaagtgcggcgaaattacttgctgctgaagtgaaggatgagaagacggatacagttctgcgtggccgctgcgcagtacattgggtgactcccgacggcttccctgtgtggcaggaatacaagaagcctattcaaacgcgcttgaacctgatgttcctcggtcagttccgcttacagcctaccattaacaccaacaaagatagcgagattgatgcacgcaaacaggtgtctggtatcgctcctaactttgtacacagcctggacggtaaccaccttcgtatgactgtagtgtgggcacacgagaagtacggaatcgaatcttttgcactgattcacgactccttcggtaccattccggctgacgctgcgaacctgttcaaagcagtgcgcgaaactttcgttgacacatatgagtcttgtgatgtactggctgatttctacgaccagattgctgaccagttgcacgagtctcaacgcgacaaaatgccagcacttccggctaaaggtaagttgaacctccgtgacatcttaaaatcggacttcgcgttcgcg

SEQ ID NO: 1644 - protein, 890 aa, synthetic construct
  REGION 1..890: note = Variant of RNA polymerase
MHHHHHHMNTINIAKNDFSDIELAAIPFNTLADHYGERLAREQLALEHESYEMGEARFRKMFERQLKAGEVADNAAAKPLITTLLPKMIARINDWFEEVKAKRGKRPTAFQFLQEIKPEAVAYITIKTTLAWLTSADNTTVQAVASAIGRAIEDEARFGRIRDLEAKHFKKNVEEQLNKRVGHVYKKAFMQVVEHDMLSKGLLGGEAWSSWHKEDSIHVGVRCIEMLIESTGMVSLHRQNAGVVGADSETIELAPEYAEAIATRAGALAGISPMFQPCVVPPKPWTGITGGGYWAAGRKPLQLVRTRSLAALRRYEEVSMPEVIKAVNIAQNTAWRINKKVLDVANTITQWQHCPVADVPAMDRGEMPARPLDIDTNEIALKAWKKEASAFYRKDKARMSRRLSMEFMLSQANKFANYEAIWFPQNMDWRGRVYAVPMFNPQGNDMTKGLLTFAQEKPIGEDGFYWLKIHGANTAGVDKVPFPQRIKFVEDNHTNIMECAKAPLENTWWAEQDSPFCFLAFCFEYAGVINSGLSYNCSLPLAFDGSCSGLQHFSAMLRDEIGGKAVNLLPSAEYQDIYRIVSDKVNEMLKQDLINGTSTTVETVTDKKTGEITQRTKYGTKVMAQWWLEHGVNRGVTKRPVMTLVYGSKEFGFRDQVLSDTIQPAIDNGKGDMFLNPNQAAGYMAKLIWNAVSGTVVAAVEAMNWLKSAAKLLAAEVKDEKTDTVLRGRCAVHWVTPDGFPVWQEYKKPIQTRLNLMFLGQFRLQPTINTNKDSEIDARKQVSGIAPNFVHSLDGNHLRMTVVWAHEKYGIESFALIHDSFGTIPADAANLFKAVRETFVDTYESCDVLADFYDQIADQLHESQRDKMPALPAKGKLNLRDILKSDFAFA

SEQ ID NO: 1645 - DNA, 2670 bp, synthetic construct
  misc_feature 1..2670: note = Variant of RNA polymerase
  source 1..2670: mol_type = other DNA
atgcaccatcaccatcaccatatgaacacgattaacattgctaagaacgacttctctgacatcgaactggctgctatcccgttcaacactctggctgaccattacggtgagcgtttagctcgcgaacagttggcccttgagcatgagtcttacgagatgggtgaagcacgcttccgcaagatgtttgagcgtcaacttaaagctggtgaggttgcggataacgctgccgccaagcctctcatcactaccctactccctaagatgattgcacgcatcaacgactggtttgaggaagtgaaagctaagcgcggcaagcgcccgacagccttccagttcctgcaagaaatcaagccggaagccgtagcgtacatcaccattaagaccactctggcttgcctaaccagtgcggacaatacaaccgttcaggctgtagcaagcgcaatcggtcgggccattgaggacgaggctcgcttcggtcgtatccgtgaccttgaagctaagcacttcaagaagaacgttgaggaacaactcaacaagcgcgtagggcacgtctacaagaaagcatttatgcaagttgtcgagcacgacatgctctctaagggtctactcggtggcgaggcgtggtcttcgtggcataaggaagactctattcatgtaggagtacgctgcatcgagatgctcattgagtcaaccggaatggttagcttacaccgccaaaatgctggcgtagtgggtgcagactctgagactatcgaactcgcacctgaatacgctgaggctatcgcaacccgtgcaggtgcgctggctggcatctctccgatgttccaaccttgcgtagttcctcctaagccgtggactggcattactggtggtggctattgggctgcggggcgcaaacccctgcagttagtacgtactcgcagtctgaaggcgcttcgccgctatgaagaagtgtcgatgccggaggtcatcaaagcagtcaacattgcgcagaatacagcatggcgtattaacaagaaagttctcgacgtagcgaataccatcacccaatggcagcactgtccagtcgcggatgtgcctgcgatggatcgtggcgaaatgccagctcgtccgttggacatcgataccaacgagattgcacttaaagcgtggaagaaagaagcttccgcgttctaccgcaaagacaaagcacgcatgagccgtcgtctgtcgatggagtttatgttatctcaggcgaacaagtttgcgaattatgaggcaatctggtttccgcaaaacatggattggcgtgggcgcgtgtacgctgtcccgatgttcaatcctcagggcaacgatatgacgaaaggcctgctgacctttgcgcaggagaaacccattggtgaagacggcttctattggctcaagattcatggcgcaaatacagctggagtggataaagtaccgtttccacaacgcatcaaatttgttgaggataaccatacgaatattatggaatgcgcgaaagcaccgctggaaaacacttggtgggcggaacaggactcgccgttctgctttctggcgttctgctttgagtatgctggcgtcatcaatagtggtctgtcgtacaactgtagcttgcctctggcatttgatggtagttgctccggcctgcaacatttctcagcgatgttacgcgacgaagttggcggcaaagctgtgaatctcctcccatctgcggaataccaggatatttatggtatcgtcagcgacaaagttaacgagatgctgaaacaagatctgattaacggtacctctaccaccgtggaaacggtgactgataaaaagacaggcgaaattacccaacgcacgaaatacgggaccaaagttatggcacaatggtggttagaacacggtgtgaatcgtggcgtcacgaaacgcccggttatgactttggtgtatgggagcaaagagtttggattccgcgatcaagtgctgagtgacaccattcaaccggcgatcgataacggcaagggtctgatgtttctgaatccgaatcaggctgctggttacatggcgaaactgatctggaacgcagtgtccgggaccgtagtcgcagcagttgaggcgatgaactggctgaaaagtgcggcgaaattacttgctgctgaagtgaaggatgagaagacggatacagttctgcgtggccgctgcgcagtacattgggtgactcccgacggcttccctgtgtggcaggaatacaagaagcctattcaaacgcgcttgaacctgatgttcctcggtcagttccgcttacagcctaccattaacaccaacaaagatagcgagattgatgcacgcaaacaggtgtctggtatcgctcctaactttgtacacagcctggacggtaaccaccttcgtatgactgtagtgtgggcacacgagaagtacggaatcgaatcttttgcactgattcacgactccttcggtaccattccggctgacgctgcgaacctgttcaaagcagtgcgcgaaactttcgttgacacatatgagtcttgtgatgtactggctgatttctacgaccagattgctgaccagttgcacgagtctcaacgcgacaaaatgccagcacttccggctaaaggtaagttgaacctccgtgacatcttaaaatcggacttcgcgttcgcg

SEQ ID NO: 1646 - protein, 890 aa, synthetic construct
  REGION 1..890: note = Variant of RNA polymerase
MHHHHHHMNTINIAKNDFSDIELAAIPFNTLADHYGERLAREQLALEHESYEMGEARFRKMFERQLKAGEVADNAAAKPLITTLLPKMIARINDWFEEVKAKRGKRPTAFQFLQEIKPEAVAYITIKTTLACLTSADNTTVQAVASAIGRAIEDEARFGRIRDLEAKHFKKNVEEQLNKRVGHVYKKAFMQVVEHDMLSKGLLGGEAWSSWHKEDSIHVGVRCIEMLIESTGMVSLHRQNAGVVGADSETIELAPEYAEAIATRAGALAGISPMFQPCVVPPKPWTGITGGGYWAAGRKPLQLVRTRSLKALRRYEEVSMPEVIKAVNIAQNTAWRINKKVLDVANTITQWQHCPVADVPAMDRGEMPARPLDIDTNEIALKAWKKEASAFYRKDKARMSRRLSMEFMLSQANKFANYEAIWFPQNMDWRGRVYAVPMFNPQGNDMTKGLLTFAQEKPIGEDGFYWLKIHGANTAGVDKVPFPQRIKFVEDNHTNIMECAKAPLENTWWAEQDSPFCFLAFCFEYAGVINSGLSYNCSLPLAFDGSCSGLQHFSAMLRDEVGGKAVNLLPSAEYQDIYGIVSDKVNEMLKQDLINGTSTTVETVTDKKTGEITQRTKYGTKVMAQWWLEHGVNRGVTKRPVMTLVYGSKEFGFRDQVLSDTIQPAIDNGKGLMFLNPNQAAGYMAKLIWNAVSGTVVAAVEAMNWLKSAAKLLAAEVKDEKTDTVLRGRCAVHWVTPDGFPVWQEYKKPIQTRLNLMFLGQFRLQPTINTNKDSEIDARKQVSGIAPNFVHSLDGNHLRMTVVWAHEKYGIESFALIHDSFGTIPADAANLFKAVRETFVDTYESCDVLADFYDQIADQLHESQRDKMPALPAKGKLNLRDILKSDFAFA

SEQ ID NO: 1647 - DNA, 2670 bp, synthetic construct
  misc_feature 1..2670: note = Variant of RNA polymerase
  source 1..2670: mol_type = other DNA
atgcaccatcaccatcaccatatgaacacgattaacattgctaagaacgacttctctgacatcgaactggctgctatcccgttcaacactctggctgaccattacggtgagcgtttagctcgcgaacagttggcccttgagcatgagtcttacgagatgggtgaagcacgcttccgcaagatgtttgagcgtcaacttaaagctggtgaggttgcggataacgctgccgccaagcctctcatcactaccctactccctaagatgattgcacgcatcaacgactggtttgaggaagtgaaagctaagcgcggcaagcgcccgacagccttccagttcctgcaagaaatcaagccggaagccgtagcgtacatcaccattaagaccactctggcttgcctaaccagtgcggacaatacaaccgttcaggctgtagcaagcgcaatcggtcgggccattgaggacgaggctcgcttcggtcgtatccgtgaccttgaagctaagcacttcaagaagaacgttgaggaacaactcaacaagcgcgtagggcacgtctacaagaaagcatttatgcaagttgtcgagcacgacatgctctctaagggtctactcggtggcgaggcgtggtcttcgtggcataaggaagactctattcatgtaggagtacgctgcatcgagatgctcattgagtcaaccggaatggttagcttacaccgccaaaatgctggcgtagtgggtgcagactctgagactatcgaactcgcacctgaatacgctgaggctatcgcaacccgtgcaggtgcgctggctggcatctctccgatgttccaaccttgcgtagttcctcctaagccgtggactggcattactggtggtggctattgggctgcggggcgcaaacccctgcagttagtacgtactcgcagtctggcggcgcagcgccgctatgaagaagtgtcgatgccggaggtcatcaaagcagtcaacattgcgcagaatacagcatggcgtattaacaagaaagttctcgacgtagcgaataccatcacccaatggcagcactgtccagtcgcggatgtgcctgcgatggatcgtggcgaaatgccagctcgtccgttggacatcgataccaacgagattgcacttaaagcgtggaagaaagaagcttccgcgttctaccgcaaagacaaagcacgcatgagccgtcgtctgtcgatggagtttatgttatctcaggcgaacaagtttgcgaattatgaggcaatctggtttccgcaaaacatggattggcgtgggcgcgtgtacgctgtcccgatgttcaatcctcagggcaacgatatgacgaaaggcctgctgacctttgcgcaggagaaacccattggtgaagacggcttctattggctcaagattcatggcgcaaatacagctggagtggataaagtaccgtttccacaacgcatcaaatttgttgaggataaccatacgaatattatggaatgcgcgaaagcaccgctggaaaacacttggtgggcggaacaggactcgccgttctgctttctggcgttctgctttgagtatgctggcgtcatcaatagtggtctgtcgtacaactgtagcttgcctctggcatttgatggtagttgctccggcctgcaacatttctcagcgatgttacgcgacgaaattggcggcaaagctgtgaatctcctcccatctgcggaataccaggatatttatcgtatcgtcagcgacaaagttaacgagatgctgaaacaagatctgattaacggtacctctaccaccgtggaaacggtgactgataaaaagacaggcgaaattacccaacgcacgaaatacgggaccaaagttatggcacagtggtggttagaacacggtgtgaatcgtggcgtcacgaaacgcccggttatgactttggtgtatgggagcaaagagtttggattccgcgatcaagtgctgagtgacaccattcaaccggcgatcgataacggcaagggtgacatgtttctgaatccgaatcaggctgctggttacatggcgaaactgatctggaacgcagtgtccgggaccgtagtcgcagcagttgaggcgatgaactggctgaaaagtgcggcgaaattacttgctgctgaagtgaaggatgagaagacggatacagttctgcgtggccgctgcgcagtacattgggtgactcccgacggcttccctgtgtggcaggaatacaagaagcctattcaaacgcgcttgaacctgatgttcctcggtcagttccgcttacagcctaccattaacaccaacaaagatagcgagattgatgcacgcaaacaggtgtctggtatcgctcctaactttgtacacagcctggacggtaaccaccttcgtatgactgtagtgtgggcacacgagaagtacggaatcgaatcttttgcactgattcacgactccttcggtaccattccggctgacgctgcgaacctgttcaaagcagtgcgcgaaactttcgttgacacatatgagtcttgtgatgtactggctgatttctacgaccagattgctgaccagttgcacgagtctcaacgcgacaaaatgccagcacttccggctaaaggtaagttgaacctccgtgacatcttaaaatcggacttcgcgttcgcg

SEQ ID NO: 1648 - protein, 890 aa, synthetic construct
  REGION 1..890: note = Variant of RNA polymerase
MHHHHHHMNTINIAKNDFSDIELAAIPFNTLADHYGERLAREQLALEHESYEMGEARFRKMFERQLKAGEVADNAAAKPLITTLLPKMIARINDWFEEVKAKRGKRPTAFQFLQEIKPEAVAYITIKTTLACLTSADNTTVQAVASAIGRAIEDEARFGRIRDLEAKHFKKNVEEQLNKRVGHVYKKAFMQVVEHDMLSKGLLGGEAWSSWHKEDSIHVGVRCIEMLIESTGMVSLHRQNAGVVGADSETIELAPEYAEAIATRAGALAGISPMFQPCVVPPKPWTGITGGGYWAAGRKPLQLVRTRSLAAQRRYEEVSMPEVIKAVNIAQNTAWRINKKVLDVANTITQWQHCPVADVPAMDRGEMPARPLDIDTNEIALKAWKKEASAFYRKDKARMSRRLSMEFMLSQANKFANYEAIWFPQNMDWRGRVYAVPMFNPQGNDMTKGLLTFAQEKPIGEDGFYWLKIHGANTAGVDKVPFPQRIKFVEDNHTNIMECAKAPLENTWWAEQDSPFCFLAFCFEYAGVINSGLSYNCSLPLAFDGSCSGLQHFSAMLRDEIGGKAVNLLPSAEYQDIYRIVSDKVNEMLKQDLINGTSTTVETVTDKKTGEITQRTKYGTKVMAQWWLEHGVNRGVTKRPVMTLVYGSKEFGFRDQVLSDTIQPAIDNGKGDMFLNPNQAAGYMAKLIWNAVSGTVVAAVEAMNWLKSAAKLLAAEVKDEKTDTVLRGRCAVHWVTPDGFPVWQEYKKPIQTRLNLMFLGQFRLQPTINTNKDSEIDARKQVSGIAPNFVHSLDGNHLRMTVVWAHEKYGIESFALIHDSFGTIPADAANLFKAVRETFVDTYESCDVLADFYDQIADQLHESQRDKMPALPAKGKLNLRDILKSDFAFA

SEQ ID NO: 1649 - DNA, 2670 bp, synthetic construct
  misc_feature 1..2670: note = Variant of RNA polymerase
  source 1..2670: mol_type = other DNA
atgcaccatcaccatcaccatatgaacacgattaacattgctaagaacgacttctctgacatcgaactggctgctatcccgttcaacactctggctgaccattacggtgagcgtttagctcgcgaacagttggcccttgagcatgagtcttacgagatgggtgaagcacgcttccgcaagatgtttgagcgtcaacttaaagctggtgaggttgcggataacgctgccgccaagcctctcatcactaccctactccctaagatgattgcacgcatcaacgactggtttgaggaagtgaaagctaagcgcggcaagcgcccgacagccttccagttcctgcaagaaatcaagccggaagccgtagcgtacatcaccattaagaccactctggcttgcctaaccagtgcggacaatacaaccgttcaggctgtagcaagcgcaatcggtcgggccattgaggacgaggctcgcttcggtcgtatccgtgaccttgaagctaagcacttcaagaagaacgttgaggaacaactcaacaagcgcgtagggcacgtctacaagaaagcatttatgcaagttgtcgagcacgacatgctctctaagggtctactcggtggcgaggcgtggtcttcgtggcataaggaagactctattcatgtaggagtacgctgcatcgagatgctcattgagtcaaccggaatggttagcttatcgcgccaaaatgctggcgtagtgggtgcagactctgagactatcgaactcgcacctgaatacgctgaggctatcgcaacccgtgcaggtgcgctggctggcatctctccgatgttccaaccttgcgtagttcctcctaagccgtggactggcattactggtggtggctattgggctgcggggcgcaaacccctgcagttagtacgtactcgcagtctggcggcgcttcgccgctatgaagaagtgtcgatgccggaggtcatcaaagcagtcaacattgcgcagaatacagcatggcgtattaacaagaaagttctcgacgtagcgaataccatcacccaatggcagcactgtccagtcgcggatgtgcctgcgatggatcgtggcgaaatgccagctcgtccgttggacatcgataccaacgagattgcacttaaagcgtggaagaaagaagcttccgcgttctaccgcaaagacaaagcacgcatgagccgtcgtctgtcgatggagtttatgttatctcaggcgaacaagtttgcgaattatgaggcaatctggtttccgcaaaacatggattggcgtgggcgcgtgtacgctgtcccgatgttcaatcctcagggcaacgatatgacgaaaggcctgctgacctttgcgcaggagaaacccattggtgaagacggcttctattggctcaagattcatggcgcaaatacagctggagtggataaagtaccgtttccacaacgcatcaaatttgttgaggataaccatacgaatattatggaatgcgcgaaagcaccgctggaaaacacttggtgggcggaacaggactcgccgttctgctttctggcgttctgctttgagtatgctggcgtcatcaatagtggtctgtcgtacaactgtagcttgcctctggcatttgatggtagttgctccggcctgcaacatttctcagcgatgttacgcgacgaaattggcggcaaagctgtgaatctcctcccatctgcggaataccaggatatttatcgtatcgtcagcgacaaagttaacgagatgctgaaacaagatctgattaacggtacctctaccaccgtggaaacggtgactgataaaaagacaggcgaaattacccaacgcacgaaatacgggaccaaagttatggcacagtggtggttagaacacggtgtgaatcgtggcgtcacgaaacgcccggttatgactttggtgtatgggagcaaagagtttggattccgcgatcaagtgctgagtgacaccattcaaccggcgatcgataacggcaagggtgacatgtttctgaatccgaatcaggctgctggttacatggcgaaactgatctggaacgcagtgtccgggaccgtagtcgcagcagttgaggcgatgaactggctgaaaagtgcggcgaaattacttgctgctgaagtgaaggatgagaagacggatacagttctgcgtggccgctgcgcagtacattgggtgactcccgacggcttccctgtgtggcaggaatacaagaagcctattcaaacgcgcttgaacctgatgttcctcggtcagttccgcttacagcctaccattaacaccaacaaagatagcgagattgatgcacgcaaacaggtgtctggtatcgctcctaactttgtacacagcctggacggtaaccaccttcgtatgactgtagtgtgggcacacgagaagtacggaatcgaatcttttgcactgattcacgactccttcggtaccattccggctgacgctgcgaacctgttcaaagcagtgcgcgaaactttcgttgacacatatgagtcttgtgatgtactggctgatttctacgaccagattgctgaccagttgcacgagtctcaacgcgacaaaatgccagcacttccggctaaaggtaagttgaacctccgtgacatcttaaaatcggacttcgcgttcgcg

SEQ ID NO: 1650 - protein, 890 aa, synthetic construct
  REGION 1..890: note = Variant of RNA polymerase
MHHHHHHMNTINIAKNDFSDIELAAIPFNTLADHYGERLAREQLALEHESYEMGEARFRKMFERQLKAGEVADNAAAKPLITTLLPKMIARINDWFEEVKAKRGKRPTAFQFLQEIKPEAVAYITIKTTLACLTSADNTTVQAVASAIGRAIEDEARFGRIRDLEAKHFKKNVEEQLNKRVGHVYKKAFMQVVEHDMLSKGLLGGEAWSSWHKEDSIHVGVRCIEMLIESTGMVSLSRQNAGVVGADSETIELAPEYAEAIATRAGALAGISPMFQPCVVPPKPWTGITGGGYWAAGRKPLQLVRTRSLAALRRYEEVSMPEVIKAVNIAQNTAWRINKKVLDVANTITQWQHCPVADVPAMDRGEMPARPLDIDTNEIALKAWKKEASAFYRKDKARMSRRLSMEFMLSQANKFANYEAIWFPQNMDWRGRVYAVPMFNPQGNDMTKGLLTFAQEKPIGEDGFYWLKIHGANTAGVDKVPFPQRIKFVEDNHTNIMECAKAPLENTWWAEQDSPFCFLAFCFEYAGVINSGLSYNCSLPLAFDGSCSGLQHFSAMLRDEIGGKAVNLLPSAEYQDIYRIVSDKVNEMLKQDLINGTSTTVETVTDKKTGEITQRTKYGTKVMAQWWLEHGVNRGVTKRPVMTLVYGSKEFGFRDQVLSDTIQPAIDNGKGDMFLNPNQAAGYMAKLIWNAVSGTVVAAVEAMNWLKSAAKLLAAEVKDEKTDTVLRGRCAVHWVTPDGFPVWQEYKKPIQTRLNLMFLGQFRLQPTINTNKDSEIDARKQVSGIAPNFVHSLDGNHLRMTVVWAHEKYGIESFALIHDSFGTIPADAANLFKAVRETFVDTYESCDVLADFYDQIADQLHESQRDKMPALPAKGKLNLRDILKSDFAFA

SEQ ID NO: 1651 - DNA, 2670 bp, synthetic construct
  misc_feature 1..2670: note = Variant of RNA polymerase
  source 1..2670: mol_type = other DNA
atgcaccatcaccatcaccatatgaacacgattaacattgctaagaacgacttctctgacatcgaactggctgctatcccgttcaacactctggctgaccattacggtgagcgtttagctcgcgaacagttggcccttgagcatgagtcttacgagatgggtgaagcacgcttccgcaagatgtttgagcgtcaacttaaagctggtgaggttgcggataacgctgccgccaagcctctcatcactaccctactccctaagatgattgcacgcatcaacgactggtttgaggaagtgaaagctaagcgcggcaagcgcccgacagccttccagttcctgcaagaaatcaagccggaagccgtagcgtacatcaccattaagaccactctggcttgcctaaccagtgcggacaatacaaccgttcaggctgtagcaagcgcaatcggtcgggccattgaggacgaggctcgcttcggtcgtatccgtgaccttgaagctaagcacttcaagaagaacgttgaggaacaactcaacaagcgcgtagggcacgtctacaagaaagcatttatgcaagttgtcgagcacgacatgctctctaagggtctactcggtggcgaggcgtggtcttcgtggcataaggaagactctattcatgtaggagtacgctgcatcgagatgctcattgagtcaaccggaatggttagcttacaccgccaaaatgctggcgtagtgggtgcagactctgagactatcgaactcgcacctgaatacgctgaggctatcgcaacccgtgcaggtgcgctggctggcatctctccgatgttccaaccttgcgtagttcctcctaagccgtggactggcattactggtggtggctattgggctgcggggcgcaaacccctgcagttagtacgtactcgcagtctggcggcgcggcgccgctatgaagaagtgtcgatgccggaggtcatcaaagcagtcaacattgcgcagaatacagcatggcgtattaacaagaaagttctcgacgtagcgaataccatcacccaatggcagcactgtccagtcgcggatgtgcctgcgatggatcgtggcgaaatgccagctcgtccgttggacatcgataccaacgagattgcacttaaagcgtggaagaaagaagcttccgcgttctaccgcaaagacaaagcacgcatgagccgtcgtctgtcgatggagtttatgttatctcaggcgaacaagtttgcgaattatgaggcaatctggtttccgcaaaacatggattggcgtgggcgcgtgtacgctgtcccgatgttcaatcctcagggcaacgatatgacgaaaggcctgctgacctttgcgcaggagaaacccattggtgaagacggcttctattggctcaagattcatggcgcaaatacagctggagtggataaagtaccgtttccacaacgcatcaaatttgttgaggataaccatacgaatattatggaatgcgcgaaagcaccgctggaaaacacttggtgggcggaacaggactcgccgttctgctttctggcgttctgctttgagtatgctggcgtcatcaatagtggtctgtcgtacaactgtagcttgcctctggcatttgatggtagttgctccggcctgcaacatttctcagcgatgttacgcgacgaaattggcggcaaagctgtgaatctcctcccatctgcggaataccaggatatttatcgtatcgtcagcgacaaagttaacgagatgctgaaacaagatctgattaacggtacctctaccaccgtggaaacggtgactgataaaaagacaggcgaaattacccaacgcacgaaatacgggaccaaagttatggcacagtggtggttagaacacggtgtgaatcgtggcgtcacgaaacgcccggttatgactttggtgtatgggagcaaagagtttggattccgcgatcaagtgctgagtgacaccattcaaccggcgatcgataacggcaagggtgacatgtttctgaatccgaatcaggctgctggttacatggcgaaactgatctggaacgcagtgtccgggaccgtagtcgcagcagttgaggcgatgaactggctgaaaagtgcggcgaaattacttgctgctgaagtgaaggatgagaagacggatacagttctgcgtggccgctgcgcagtacattgggtgactcccgacggcttccctgtgtggcaggaatacaagaagcctattcaaacgcgcttgaacctgatgttcctcggtcagttccgcttacagcctaccattaacaccaacaaagatagcgagattgatgcacgcaaacaggtgtctggtatcgctcctaactttgtacacagcctggacggtaaccaccttcgtatgactgtagtgtgggcacacgagaagtacggaatcgaatcttttgcactgattcacgactccttcggtaccattccggctgacgctgcgaacctgttcaaagcagtgcgcgaaactttcgttgacacatatgagtcttgtgatgtactggctgatttctacgaccagattgctgaccagttgcacgagtctcaacgcgacaaaatgccagcacttccggctaaaggtaagttgaacctccgtgacatcttaaaatcggacttcgcgttcgcg

SEQ ID NO: 1652 - protein, 890 aa, synthetic construct
  REGION 1..890: note = Variant of RNA polymerase
MHHHHHHMNTINIAKNDFSDIELAAIPFNTLADHYGERLAREQLALEHESYEMGEARFRKMFERQLKAGEVADNAAAKPLITTLLPKMIARINDWFEEVKAKRGKRPTAFQFLQEIKPEAVAYITIKTTLACLTSADNTTVQAVASAIGRAIEDEARFGRIRDLEAKHFKKNVEEQLNKRVGHVYKKAFMQVVEHDMLSKGLLGGEAWSSWHKEDSIHVGVRCIEMLIESTGMVSLHRQNAGVVGADSETIELAPEYAEAIATRAGALAGISPMFQPCVVPPKPWTGITGGGYWAAGRKPLQLVRTRSLAARRRYEEVSMPEVIKAVNIAQNTAWRINKKVLDVANTITQWQHCPVADVPAMDRGEMPARPLDIDTNEIALKAWKKEASAFYRKDKARMSRRLSMEFMLSQANKFANYEAIWFPQNMDWRGRVYAVPMFNPQGNDMTKGLLTFAQEKPIGEDGFYWLKIHGANTAGVDKVPFPQRIKFVEDNHTNIMECAKAPLENTWWAEQDSPFCFLAFCFEYAGVINSGLSYNCSLPLAFDGSCSGLQHFSAMLRDEIGGKAVNLLPSAEYQDIYRIVSDKVNEMLKQDLINGTSTTVETVTDKKTGEITQRTKYGTKVMAQWWLEHGVNRGVTKRPVMTLVYGSKEFGFRDQVLSDTIQPAIDNGKGDMFLNPNQAAGYMAKLIWNAVSGTVVAAVEAMNWLKSAAKLLAAEVKDEKTDTVLRGRCAVHWVTPDGFPVWQEYKKPIQTRLNLMFLGQFRLQPTINTNKDSEIDARKQVSGIAPNFVHSLDGNHLRMTVVWAHEKYGIESFALIHDSFGTIPADAANLFKAVRETFVDTYESCDVLADFYDQIADQLHESQRDKMPALPAKGKLNLRDILKSDFAFA

SEQ ID NO: 1653 - DNA, 2670 bp, synthetic construct
  misc_feature 1..2670: note = Variant of RNA polymerase
  source 1..2670: mol_type = other DNA
atgcaccatcaccatcaccatatgaacacgattaacattgctaagaacgacttctctgacatcgaactggctgctatcccgttcaacactctggctgaccattacggtgagcgtttagctcgcgaacagttggcccttgagcatgagtcttacgagatgggtgaagcacgcttccgcaagatgtttgagcgtcaacttaaagctggtgaggttgcggataacgctgccgccaagcctctcatcactaccctactccctaagatgattgcacgcatcaacgactggtttgaggaagtgaaagctaagcgcggcaagcgcccgacagccttccagttcctgcaagaaatcaagccggaagccgtagcgtacatcaccattaagaccactctggcttgcctaaccagtgcggacaatacaaccgttcaggctgtagcaagcgcaatcggtcgggccattgaggacgaggctcgcttcggtcgtatccgtgaccttgaagctaagcacttcaagaagaacgttgaggaacaactcaacaagcgcgtagggcacgtctacaagaaagcatttatgcaagttgtcgagcacgacatgctctctaagggtctactcggtggcgaggcgtggtcttcgtggcataaggaagactctattcatgtaggagtacgctgcatcgagatgctcattgagtcaaccggaatggttagcttacaccgccaaaatgctggcgtagtgggtgcagactctgagactatcgaactcgcacctgaatacgctgaggctatcgcaacccgtgcaggtgcgctggctggcatctctccgatgttccaaccttgcgtagttcctcctaagccgtggactggcattactggtggtggctattgggctgcggggcgcaaacccctgcagttagtacgtactcgcagttctgcggcgcttcgccgctatgaagaagtgtcgatgccggaggtcatcaaagcagtcaacattgcgcagaatacagcatggcgtattaacaagaaagttctcgacgtagcgaataccatcacccaatggcagcactgtccagtcgcggatgtgcctgcgatggatcgtggcgaaatgccagctcgtccgttggacatcgataccaacgagattgcacttaaagcgtggaagaaagaagcttccgcgttctaccgcaaagacaaagcacgcatgagccgtcgtctgtcgatggagtttatgttatctcaggcgaacaagtttgcgaattatgaggcaatctggtttccgcaaaacatggattggcgtgggcgcgtgtacgctgtcccgatgttcaatcctcagggcaacgatatgacgaaaggcctgctgacctttgcgcaggagaaacccattggtgaagacggcttctattggctcaagattcatggcgcaaatacagctggagtggataaagtaccgtttccacaacgcatcaaatttgttgaggataaccatacgaatattatggaatgcgcgaaagcaccgctggaaaacacttggtgggcggaacaggactcgccgttctgctttctggcgttctgctttgagtatgctggcgtcatcaatagtggtctgtcgtacaactgtagcttgcctctggcatttgatggtagttgctccggcctgcaacatttctcagcgatgttacgcgacgaaattggcggcaaagctgtgaatctcctcccatctgcggaataccaggatatttatcgtatcgtcagcgacaaagttaacgagatgctgaaacaagatctgattaacggtacctctaccaccgtggaaacggtgactgataaaaagacaggcgaaattacccaacgcacgaaatacgggaccaaagttatggcacagtggtggttagaacacggtgtgaatcgtggcgtcacgaaacgcccggttatgactttggtgtatgggagcaaagagtttggattccgcgatcaagtgctgagtgacaccattcaaccggcgatcgataacggcaagggtgacatgtttctgaatccgaatcaggctgctggttacatggcgaaactgatctggaacgcagtgtccgggaccgtagtcgcagcagttgaggcgatgaactggctgaaaagtgcggcgaaattacttgctgctgaagtgaaggatgagaagacggatacagttctgcgtggccgctgcgcagtacattgggtgactcccgacggcttccctgtgtggcaggaatacaagaagcctattcaaacgcgcttgaacctgatgttcctcggtcagttccgcttacagcctaccattaacaccaacaaagatagcgagattgatgcacgcaaacaggtgtctggtatcgctcctaactttgtacacagcctggacggtaaccaccttcgtatgactgtagtgtgggcacacgagaagtacggaatcgaatcttttgcactgattcacgactccttcggtaccattccggctgacgctgcgaacctgttcaaagcagtgcgcgaaactttcgttgacacatatgagtcttgtgatgtactggctgatttctacgaccagattgctgaccagttgcacgagtctcaacgcgacaaaatgccagcacttccggctaaaggtaagttgaacctccgtgacatcttaaaatcggacttcgcgttcgcg

SEQ ID NO: 1654 - protein, 890 aa, synthetic construct
  REGION 1..890: note = Variant of RNA polymerase
MHHHHHHMNTINIAKNDFSDIELAAIPFNTLADHYGERLAREQLALEHESYEMGEARFRKMFERQLKAGEVADNAAAKPLITTLLPKMIARINDWFEEVKAKRGKRPTAFQFLQEIKPEAVAYITIKTTLACLTSADNTTVQAVASAIGRAIEDEARFGRIRDLEAKHFKKNVEEQLNKRVGHVYKKAFMQVVEHDMLSKGLLGGEAWSSWHKEDSIHVGVRCIEMLIESTGMVSLHRQNAGVVGADSETIELAPEYAEAIATRAGALAGISPMFQPCVVPPKPWTGITGGGYWAAGRKPLQLVRTRSSAALRRYEEVSMPEVIKAVNIAQNTAWRINKKVLDVANTITQWQHCPVADVPAMDRGEMPARPLDIDTNEIALKAWKKEASAFYRKDKARMSRRLSMEFMLSQANKFANYEAIWFPQNMDWRGRVYAVPMFNPQGNDMTKGLLTFAQEKPIGEDGFYWLKIHGANTAGVDKVPFPQRIKFVEDNHTNIMECAKAPLENTWWAEQDSPFCFLAFCFEYAGVINSGLSYNCSLPLAFDGSCSGLQHFSAMLRDEIGGKAVNLLPSAEYQDIYRIVSDKVNEMLKQDLINGTSTTVETVTDKKTGEITQRTKYGTKVMAQWWLEHGVNRGVTKRPVMTLVYGSKEFGFRDQVLSDTIQPAIDNGKGDMFLNPNQAAGYMAKLIWNAVSGTVVAAVEAMNWLKSAAKLLAAEVKDEKTDTVLRGRCAVHWVTPDGFPVWQEYKKPIQTRLNLMFLGQFRLQPTINTNKDSEIDARKQVSGIAPNFVHSLDGNHLRMTVVWAHEKYGIESFALIHDSFGTIPADAANLFKAVRETFVDTYESCDVLADFYDQIADQLHESQRDKMPALPAKGKLNLRDILKSDFAFA

SEQ ID NO: 1655 - DNA, 2670 bp, synthetic construct
  misc_feature 1..2670: note = Variant of RNA polymerase
  source 1..2670: mol_type = other DNA
atgcaccatcaccatcaccatatgaacacgattaacattgctaagaacgacttctctgacatcgaactggctgctatcccgttcaacactctggctgaccattacggtgagcgtttagctcgcgaacagttggcccttgagcatgagtcttacgagatgggtgaagcacgcttccgcaagatgtttgagcgtcaacttaaagctggtgaggttgcggataacgctgccgccaagcctctcatcactaccctactccctaagatgattgcacgcatcaacgactggtttgaggaagtgaaagctaagcgcggcaagcgcccgacagccttccagttcctgcaagaaatcaagccggaagccgtagcgtacatcaccattaagaccactctggcttgcctaaccagtgcggacaatacaaccgttcaggctgtagcaagcgcaatcggtcgggccattgaggacgaggctcgcttcggtcgtatccgtgaccttgaagctaagcacttcaagaagaacgttgaggaacaactcaacaagcgcgtagggcacgtctacaagaaagcatttatgcaagttgtcgagcacgacatgctctctaagggtctactcggtggcgaggcgtggtcttcgtggcataaggaagactctattcatgtaggagtacgctgcatcgagatgctcattgagtcaaccggaatggttagcttacaccgccaaaatgctggcgtagtgggtgcagactctgagactatcgaactcgcacctgaatacgctgaggctatcgcaacccgtgcaggtgcgctggctggcatctctccgatgttccaaccttgcgtagttcctcctaagccgtggactggcattactggtggtggctattgggctgcggggcgcaaacccctgcagttagtacgtactcgcagtctggcggcgcttcgccgctatgaagaagtgtcgatgccggaggtcatcaaagcagtcaacattgcgcagaatacagcatggcgtattaacaagaaagttctcgacgtagcgaataccatcacccaatggcagcactgtccagtcgcggatgtgcctgcgatggatcgtggcgaaatgccagctcgtccgttggacatcgataccaacgagattgcacttaaagcgtggaagaaagaagcttccgcgttctaccgcaaagacaaagcacgcatgagccgtcgtatctcgatggagtttatgttatctcaggcgaacaagtttgcgaattatgaggcaatctggtttccgcaaaacatggattggcgtgggcgcgtgtacgctgtcccgatgttcaatcctcagggcaacgatatgacgaaaggcctgctgacctttgcgcaggagaaacccattggtgaagacggcttctattggctcaagattcatggcgcaaatacagctggagtggataaagtaccgtttccacaacgcatcaaatttgttgaggataaccatacgaatattatggaatgcgcgaaagcaccgctggaaaacacttggtgggcggaacaggactcgccgttctgctttctggcgttctgctttgagtatgctggcgtcatcaatagtggtctgtcgtacaactgtagcttgcctctggcatttgatggtagttgctccggcctgcaacatttctcagcgatgttacgcgacgaaattggcggcaaagctgtgaatctcctcccatctgcggaataccaggatatttatcgtatcgtcagcgacaaagttaacgagatgctgaaacaagatctgattaacggtacctctaccaccgtggaaacggtgactgataaaaagacaggcgaaattacccaacgcacgaaatacgggaccaaagttatggcacagtggtggttagcgcacggtgtgaaccgtggcgtcacgaaacgcccggttatgactttggtgtatgggagcaaagagtttggattccgcgatcaagtgctgagtgacaccattcaaccggcgatcgataacggcaagggtgacatgtttctgaatccgaatcaggctgctggttacatggcgaaactgatctggaacgcagtgtccgggaccgtagtcgcagcagttgaggcgatgaactggctgaaaagtgcggcgaaattacttgctgctgaagtgaaggatgagaagacggatacagttctgcgtggccgctgcgcagtacattgggtgactcccgacggcttccctgtgtggcaggaatacaagaagcctattcaaacgcgcttgaacctgatgttcctcggtcagttccgcttacagcctaccattaacaccaacaaagatagcgagattgatgcacgcaaacaggtgtctggtatcgctcctaactttgtacacagcctggacggtaaccaccttcgtatgactgtagtgtgggcacacgagaagtacggaatcgaatcttttgcactgattcacgactccttcggtaccattccggctgacgctgcgaacctgttcaaagcagtgcgcgaaactttcgttgacacatatgagtcttgtgatgtactggctgatttctacgaccagattgctgaccagttgcacgagtctcaacgcgacaaaatgccagcacttccggctaaaggtaagttgaacctccgtgacatcttaaaatcggacttcgcgttcgcg

SEQ ID NO: 1656 - protein, 890 aa, synthetic construct
  REGION 1..890: note = Variant of RNA polymerase
MHHHHHHMNTINIAKNDFSDIELAAIPFNTLADHYGERLAREQLALEHESYEMGEARFRKMFERQLKAGEVADNAAAKPLITTLLPKMIARINDWFEEVKAKRGKRPTAFQFLQEIKPEAVAYITIKTTLACLTSADNTTVQAVASAIGRAIEDEARFGRIRDLEAKHFKKNVEEQLNKRVGHVYKKAFMQVVEHDMLSKGLLGGEAWSSWHKEDSIHVGVRCIEMLIESTGMVSLHRQNAGVVGADSETIELAPEYAEAIATRAGALAGISPMFQPCVVPPKPWTGITGGGYWAAGRKPLQLVRTRSLAALRRYEEVSMPEVIKAVNIAQNTAWRINKKVLDVANTITQWQHCPVADVPAMDRGEMPARPLDIDTNEIALKAWKKEASAFYRKDKARMSRRISMEFMLSQANKFANYEAIWFPQNMDWRGRVYAVPMFNPQGNDMTKGLLTFAQEKPIGEDGFYWLKIHGANTAGVDKVPFPQRIKFVEDNHTNIMECAKAPLENTWWAEQDSPFCFLAFCFEYAGVINSGLSYNCSLPLAFDGSCSGLQHFSAMLRDEIGGKAVNLLPSAEYQDIYRIVSDKVNEMLKQDLINGTSTTVETVTDKKTGEITQRTKYGTKVMAQWWLAHGVNRGVTKRPVMTLVYGSKEFGFRDQVLSDTIQPAIDNGKGDMFLNPNQAAGYMAKLIWNAVSGTVVAAVEAMNWLKSAAKLLAAEVKDEKTDTVLRGRCAVHWVTPDGFPVWQEYKKPIQTRLNLMFLGQFRLQPTINTNKDSEIDARKQVSGIAPNFVHSLDGNHLRMTVVWAHEKYGIESFALIHDSFGTIPADAANLFKAVRETFVDTYESCDVLADFYDQIADQLHESQRDKMPALPAKGKLNLRDILKSDFAFA

SEQ ID NO: 1657 - DNA, 2670 bp, synthetic construct
  misc_feature 1..2670: note = Variant of RNA polymerase
  source 1..2670: mol_type = other DNA
atgcaccatcaccatcaccatatgaacacgattaacattgctaagaacgacttctctgacatcgaactggctgctatcccgttcaacactctggctgaccattacggtgagcgtttagctcgcgaacagttggcccttgagcatgagtcttacgagatgggtgaagcacgcttccgcaagatgtttgagcgtcaacttaaagctggtgaggttgcggataacgctgccgccaagcctctcatcactaccctactccctaagatgattgcacgcatcaacgactggtttgaggaagtgaaagctaagcgcggcaagcgcccgacagccttccagttcctgcaagaaatcaagccggaagccgtagcgtacatcaccattaagaccactctggcttgcctaaccagtgcggacaatacaaccgttcaggctgtagcaagcgcaatcggtcgggccattgaggacgaggctcgcttcggtcgtatccgtgaccttgaagctaagcacttcaagaagaacgttgaggaacaactcaacaagcgcgtagggcacgtctacaagaaagcatttatgcaagttgtcgagcacgacatgctctctaagggtctactcggtggcgaggcgtggtcttcgtggcataaggaagactctattcatgtaggagtacgctgcatcgagatgctcattgagtcaaccggaatggttagcttacaccgccaaaatgctggcgtagtgggtgcagactctgagactatcgaactcgcacctgaatacgctgaggctatcgcaacccgtgcaggtgcgctggctggcatctctccgatgttccaaccttgcgtagttcctcctaagccgtggactggcattactggtggtggctattgggctgcggggcgcaaacccctgcagttagtacgtactcgcagtctggcggcgcttcgccgcacggaagaagtgtcgatgccggaggtcatcaaagcagtcaacattgcgcagaatacagcatggcgtattaacaagaaagttctcgacgtagcgaataccatcacccaatggcagcactgtccagtcgcggatgtgcctgcgatggatcgtggcgaaatgccagctcgtccgttggacatcgataccaacgagattgcacttaaagcgtggaagaaagaagcttccgcgttctaccgcaaagacaaagcacgcatgagccgtcgtctgtcgatggagtttatgttatctcaggcgaacaagtttgcgaattatgaggcaatctggtttccgcaaaacatggattggcgtgggcgcgtgtacgctgtcccgatgttcaatcctcagggcaacgatatgacgaaaggcctgctgacctttgcgcaggagaaacccattggtgaagacggcttctattggctcaagattcatggcgcaaatacagctggagtggataaagtaccgtttccacaacgcatcaaatttgttgaggataaccatacgaatattatggaatgcgcgaaagcaccgctggaaaacacttggtgggcggaacaggactcgccgttctgctttctggcgttctgctttgagtatgctggcgtcatcaatagtggtctgtcgtacaactgtagcttgcctctggcatttgatggtagttgctccggcctgcaacatttctcagcgatgttacgcgacgaaattggcggcaaagctgtgaatctcctcccatctgcggaataccaggatatttatcgtatcgtcagcgacaaagttaacgagatgctgaaacaagatctgattaacggtacctctaccaccgtggaaacggtgactgataaaaagacaggcgaaattacccaacgcacgaaatacgggaccaaagttatggcacagtggtggttagaacacggtgtgaatcgtggcgtcacgaaacgcccggttatgactttggtgtatgggagcaaagagtttggattccgcgatcaagtgctgagtgacaccattcaaccggcgatcgataacggcaagggtgacatgtttctgaatccgaatcaggctgctggttacatggcgaaactgatctggaacgcagtgtccgggaccgtagtcgcagcagttgaggcgatgaactggctgaaaagtgcggcgaaattacttgctgctgaagtgaaggatgagaagacggatacagttctgcgtggccgctgcgcagtacattgggtgactcccgacggcttccctgtgtggcaggaatacaagaagcctattcaaacgcgcttgaacctgatgttcctcggtcagttccgcttacagcctaccattaacaccaacaaagatagcgagattgatgcacgcaaacaggtgtctggtatcgctcctaactttgtacacagcctggacggtaaccaccttcgtatgactgtagtgtgggcacacgagaagtacggaatcgaatcttttgcactgattcacgactccttcggtaccattccggctgacgctgcgaacctgttcaaagcagtgcgcgaaactttcgttgacacatatgagtcttgtgatgtactggctgatttctacgaccagattgctgaccagttgcacgagtctcaacgcgacaaaatgccagcacttccggctaaaggtaagttgaacctccgtgacatcttaaaatcggacttcgcgttcgcg

SEQ ID NO: 1658 - protein, 890 aa, synthetic construct
  REGION 1..890: note = Variant of RNA polymerase
MHHHHHHMNTINIAKNDFSDIELAAIPFNTLADHYGERLAREQLALEHESYEMGEARFRKMFERQLKAGEVADNAAAKPLITTLLPKMIARINDWFEEVKAKRGKRPTAFQFLQEIKPEAVAYITIKTTLACLTSADNTTVQAVASAIGRAIEDEARFGRIRDLEAKHFKKNVEEQLNKRVGHVYKKAFMQVVEHDMLSKGLLGGEAWSSWHKEDSIHVGVRCIEMLIESTGMVSLHRQNAGVVGADSETIELAPEYAEAIATRAGALAGISPMFQPCVVPPKPWTGITGGGYWAAGRKPLQLVRTRSLAALRRTEEVSMPEVIKAVNIAQNTAWRINKKVLDVANTITQWQHCPVADVPAMDRGEMPARPLDIDTNEIALKAWKKEASAFYRKDKARMSRRLSMEFMLSQANKFANYEAIWFPQNMDWRGRVYAVPMFNPQGNDMTKGLLTFAQEKPIGEDGFYWLKIHGANTAGVDKVPFPQRIKFVEDNHTNIMECAKAPLENTWWAEQDSPFCFLAFCFEYAGVINSGLSYNCSLPLAFDGSCSGLQHFSAMLRDEIGGKAVNLLPSAEYQDIYRIVSDKVNEMLKQDLINGTSTTVETVTDKKTGEITQRTKYGTKVMAQWWLEHGVNRGVTKRPVMTLVYGSKEFGFRDQVLSDTIQPAIDNGKGDMFLNPNQAAGYMAKLIWNAVSGTVVAAVEAMNWLKSAAKLLAAEVKDEKTDTVLRGRCAVHWVTPDGFPVWQEYKKPIQTRLNLMFLGQFRLQPTINTNKDSEIDARKQVSGIAPNFVHSLDGNHLRMTVVWAHEKYGIESFALIHDSFGTIPADAANLFKAVRETFVDTYESCDVLADFYDQIADQLHESQRDKMPALPAKGKLNLRDILKSDFAFA

SEQ ID NO: 1659 - DNA, 2670 bp, synthetic construct
  misc_feature 1..2670: note = Variant of RNA polymerase
  source 1..2670: mol_type = other DNA
atgcaccatcaccatcaccatatgaacacgattaacattgctaagaacgacttctctgacatcgaactggctgctatcccgttcaacactctggctgaccattacggtgagcgtttagctcgcgaacagttggcccttgagcatgagtcttacgagatgggtgaagcacgcttccgcaagatgtttgagcgtcaacttaaagctggtgaggttgcggataacgctgccgccaagcctctcatcactaccctactccctaagatgattgcacgcatcaacgactggtttgaggaagtgaaagctaagcgcggcaagcgcccgacagccttccagttcctgcaagaaatcaagccggaagccgtagcgtacatcaccattaagaccactctggcttgcctaaccagtgcggacaatacaaccgttcaggctgtagcaagcgcaatcggtcgggccattgaggacgaggctcgcttcggtcgtatccgtgaccttgaagctaagcacttcaagaagaacgttgaggaacaactcaacaagcgcgtagggcacgtctacaagaaagcatttatgcaagttgtcgagcacgacatgctctctaagggtctactcggtggcgaggcgtggtcttcgtggcataaggaagactctattcatgtaggagtacgctgcatcgagatgctcattgagtcaaccggaatggttagcttacaccgccaaaatgctggcgtagtgggtgcagactctgagactatcgaactcgcacctgaatacgctgaggctatcgcaacccgtgcaggtgcgctggctggcatctctccgatgttccaaccttgcgtagttcctcctaagccgtggactggcattactggtggtggctattgggctgcggggcgcaaacccctgcagttagtacgtactcgcagtctggcggcgcttcgccgctatgaagaagtgtcgatgccggaggtcatcaaagcagtcaacattgcgcagaatacagcatggcgtattaacaagaaagttctcgacgtagcgaataccatcacccaatggcagcactgtccagtcgcggatgtgcctgcgatggatcgtggcgaaatgccagctcgtccgttggacatcgataccaacgagattgcacttaaagcgtggaagaaagaagcttccgcgttctaccgcaaagacaaagcacgcatgagccgtcgtctgtcgatggagtttatgttatctcaggcgaacaagtttgcgaattatgaggcaatctggtttccgcaaaacatggattggcgtgggcgcgtgtacgctgtcccgatgttcaatcctcagggcaacgatatgacgaaaggcctgctgacctttgcgcaggagaaacccattggtgaagacggcttctattggctcaagattcatggcgcaaatacagctggagtggataaagtaccgtttccacaacgcatcaaatttgttgaggataaccatacgaatattatggaatgcgcgaaagcaccgctggaaaacacttggtgggcggaacaggactcgccgttctgctttctggcgttctgctttgagtatgctggcgtcatcaatagtggtctgtcgtacaactgtagcttgcctctggcatttgatggtagttgctccggcctgcaacatttctcagcgatgttacgcgacgaaattggcggcaaagctgtgaatctcctcccatctgcggaataccaggatatttatcgtatcgtcagcgacaaagttaacgagatgctgaaacaagatctgattaacggtacctctaccaccgtggaaacggtgactgataaaaagacaggcgaaattacccaacgcacgaaatacgggaccaaagttatggcacagtggtggttagaacacggtgtgaatcgtggcgtcacgaaacgcccggttatgactttggtgtatgggagcaaagagtttggattccgcgatcaagtgctgagtgacaccgtgcaaccggcgatcgataacggcaagggtgacatgtttctgaatccgaatcaggctgctggttacatggcgaaactgatctggaacgcagtgtccgggaccgtagtcgcagcagttgaggcgatgaactggctgaaaagtgcggcgaaattacttgctgctgaagtgaaggatgagaagacggatacagttctgcgtggccgctgcgcagtacattgggtgactcccgacggcttccctgtgtggcaggaatacaagaagcctattcaaacgcgcttgaacctgatgttcctcggtcagttccgcttacagcctaccattaacaccaacaaagatagcgagattgatgcacgcaaacaggtgtctggtatcgctcctaactttgtacacagcctggacggtaaccaccttcgtatgactgtagtgtgggcacacgagaagtacggaatcgaatcttttgcactgattcacgactccttcggtaccattccggctgacgctgcgaacctgttcaaagcagtgcgcgaaactttcgttgacacatatgagtcttgtgatgtactggctgatttctacgaccagattgctgaccagttgcacgagtctcaacgcgacaaaatgccagcacttccggctaaaggtaagttgaacctccgtgacatcttaaaatcggacttcgcgttcgcg

SEQ ID NO: 1660 - protein, 890 aa, synthetic construct
  REGION 1..890: note = Variant of RNA polymerase
MHHHHHHMNTINIAKNDFSDIELAAIPFNTLADHYGERLAREQLALEHESYEMGEARFRKMFERQLKAGEVADNAAAKPLITTLLPKMIARINDWFEEVKAKRGKRPTAFQFLQEIKPEAVAYITIKTTLACLTSADNTTVQAVASAIGRAIEDEARFGRIRDLEAKHFKKNVEEQLNKRVGHVYKKAFMQVVEHDMLSKGLLGGEAWSSWHKEDSIHVGVRCIEMLIESTGMVSLHRQNAGVVGADSETIELAPEYAEAIATRAGALAGISPMFQPCVVPPKPWTGITGGGYWAAGRKPLQLVRTRSLAALRRYEEVSMPEVIKAVNIAQNTAWRINKKVLDVANTITQWQHCPVADVPAMDRGEMPARPLDIDTNEIALKAWKKEASAFYRKDKARMSRRLSMEFMLSQANKFANYEAIWFPQNMDWRGRVYAVPMFNPQGNDMTKGLLTFAQEKPIGEDGFYWLKIHGANTAGVDKVPFPQRIKFVEDNHTNIMECAKAPLENTWWAEQDSPFCFLAFCFEYAGVINSGLSYNCSLPLAFDGSCSGLQHFSAMLRDEIGGKAVNLLPSAEYQDIYRIVSDKVNEMLKQDLINGTSTTVETVTDKKTGEITQRTKYGTKVMAQWWLEHGVNRGVTKRPVMTLVYGSKEFGFRDQVLSDTVQPAIDNGKGDMFLNPNQAAGYMAKLIWNAVSGTVVAAVEAMNWLKSAAKLLAAEVKDEKTDTVLRGRCAVHWVTPDGFPVWQEYKKPIQTRLNLMFLGQFRLQPTINTNKDSEIDARKQVSGIAPNFVHSLDGNHLRMTVVWAHEKYGIESFALIHDSFGTIPADAANLFKAVRETFVDTYESCDVLADFYDQIADQLHESQRDKMPALPAKGKLNLRDILKSDFAFA

SEQ ID NO: 1661 - DNA, 2670 bp, synthetic construct
  misc_feature 1..2670: note = Variant of RNA polymerase
  source 1..2670: mol_type = other DNA
atgcaccatcaccatcaccatatgaacacgattaacattgctaagaacgacttctctgacatcgaactggctgctatcccgttcaacactctggctgaccattacggtgagcgtttagctcgcgaacagttggcccttgagcatgagtcttacgagatgggtgaagcacgcttccgcaagatgtttgagcgtcaacttaaagctggtgaggttgcggataacgctgccgccaagcctctcatcactaccctactccctaagatgattgcacgcatcaacgactggtttgaggaagtgaaagctaagcgcggcaagcgcccgacagccttccagttcctgcaagaaatcaagccggaagccgtagcgtacatcaccattaagaccactctggcttgcctaaccagtgcggacaatacaaccgttcaggctgtagcaagcgcaatcggtcgggccattgaggacgaggctcgcttcggtcgtatccgtgaccttgaagctaagcacttcaagaagaacgttgaggaacaactcaacaagcgcgtagggcacgtctacaagaaagcatttatgcaagttgtcgagcacgacatgctctctaagggtctactcggtggcgaggcgtggtcttcgtggcataaggaagactctattcatgtaggagtacgctgcatcgagatgctcattgagtcaaccggaatggttagcttacaccgccaaaatgctggcgtagtgggtgcagactctgagactatcgaactcgcacctgaatacgctgaggctatcgcaacccgtgcaggtgcgctggctggcatctctccgatgttccaaccttgcgtagttcctcctaagccgtggactggcattactggtggtggctattgggctgcggggcgcaaacccctgcagttagtacgtactcgcagtctggcggcgcttcgccgctatgaagaagtgtcgatgccggaggtcatcaaagcagtcaacattgcgcagaatacagcatggcgtattaacaagaaagttctcgacgtagcgaataccatcacccaatggcagcactgtccagtcgcggatgtgcctgcgatggatcgtggcgaaatgccagctcgtccgttggacatcgataccaacgagattgcacttaaagcgtggaagaaagaagcttccgcgttctaccgcaaagacaaagcacgcatgagccgtcgtctgtcgatggagtttatgttatctcaggcgaacaagtttgcgaattatgaggcaatctggtttccgcaaaacatggattggcgtgggcgcgtgtacgctgtcccgatgttcaatcctcagggcaacgatatgacgaaaggcctgctgacctttgcgcaggagaaacccattggtgaagacggcttctattggctcaagattcatggcgcaaatacagctggagtggataaagtaccgtttccacaacgcatcaaatttgttgaggataaccatacgaatattatggaatgcgcgaaagcaccgctggaaaacacttggtgggcggaacaggactcgccgttctgctttctggcgttctgctttgagtatgctggcgtcatcaatagtggtctgtcgtacaactgtagcttgcctctggcatttgatggtagttgctccggcctgcaacatttctcagcgatgttacgcgacgaaattggcggcaaagctgtgaatctcctcccatctgcggaataccaggatatttatcgtatcgtcagcgacaaagttaacgagatgctgaaacaagatctgattaacggtacctctaccaccgtggaaacggtgactgataaaaagacaggcgaaattacccaacgcacgaaatacgggaccaaagttatggcacagtggtggttagaacacggtgtgaatcgtggcgtcacgaaacgcccggttatgactttggtgtatgggagcaaagcgtttggattccgcgatcaagtgctgagtgacaccattcaaccggcgatcgataacggcaagggtgacatgtttctgaatccgaatcaggctgctggttacatggcgaaactgatctggaacgcagtgtccgggaccgtagtcgcagcagttgaggcgatgaactggctgaaaagtgcggcgaaattacttgctgctgaagtgaaggatgagaagacggatacagttctgcgtggccgctgcgcagtacattgggtgactcccgacggcttccctgtgtggcaggaatacaagaagcctattcaaacgcgcttgaacctgatgttcctcggtcagttccgcttacagcctaccattaacaccaacaaagatagcgagattgatgcacgcaaacaggtgtctggtatcgctcctaactttgtacacagcctggacggtaaccaccttcgtatgactgtagtgtgggcacacgagaagtacggaatcgaatcttttgcactgattcacgactccttcggtaccattccggctgacgctgcgaacctgttcaaagcagtgcgcgaaactttcgttgacacatatgagtcttgtgatgtactggctgatttctacgaccagattgctgaccagttgcacgagtctcaacgcgacaaaatgccagcacttccggctaaaggtaagttgaacctccgtgacatcttaaaatcggacttcgcgttcgcg

SEQ ID NO: 1662 - protein, 890 aa, synthetic construct
  REGION 1..890: note = Variant of RNA polymerase
MHHHHHHMNTINIAKNDFSDIELAAIPFNTLADHYGERLAREQLALEHESYEMGEARFRKMFERQLKAGEVADNAAAKPLITTLLPKMIARINDWFEEVKAKRGKRPTAFQFLQEIKPEAVAYITIKTTLACLTSADNTTVQAVASAIGRAIEDEARFGRIRDLEAKHFKKNVEEQLNKRVGHVYKKAFMQVVEHDMLSKGLLGGEAWSSWHKEDSIHVGVRCIEMLIESTGMVSLHRQNAGVVGADSETIELAPEYAEAIATRAGALAGISPMFQPCVVPPKPWTGITGGGYWAAGRKPLQLVRTRSLAALRRYEEVSMPEVIKAVNIAQNTAWRINKKVLDVANTITQWQHCPVADVPAMDRGEMPARPLDIDTNEIALKAWKKEASAFYRKDKARMSRRLSMEFMLSQANKFANYEAIWFPQNMDWRGRVYAVPMFNPQGNDMTKGLLTFAQEKPIGEDGFYWLKIHGANTAGVDKVPFPQRIKFVEDNHTNIMECAKAPLENTWWAEQDSPFCFLAFCFEYAGVINSGLSYNCSLPLAFDGSCSGLQHFSAMLRDEIGGKAVNLLPSAEYQDIYRIVSDKVNEMLKQDLINGTSTTVETVTDKKTGEITQRTKYGTKVMAQWWLEHGVNRGVTKRPVMTLVYGSKAFGFRDQVLSDTIQPAIDNGKGDMFLNPNQAAGYMAKLIWNAVSGTVVAAVEAMNWLKSAAKLLAAEVKDEKTDTVLRGRCAVHWVTPDGFPVWQEYKKPIQTRLNLMFLGQFRLQPTINTNKDSEIDARKQVSGIAPNFVHSLDGNHLRMTVVWAHEKYGIESFALIHDSFGTIPADAANLFKAVRETFVDTYESCDVLADFYDQIADQLHESQRDKMPALPAKGKLNLRDILKSDFAFA

SEQ ID NO: 1663 - DNA, 2670 bp, synthetic construct
  misc_feature 1..2670: note = Variant of RNA polymerase
  source 1..2670: mol_type = other DNA
atgcaccatcaccatcaccatatgaacacgattaacattgctaagaacgacttctctgacatcgaactggctgctatcccgttcaacactctggctgaccattacggtgagcgtttagctcgcgaacagttggcccttgagcatgagtcttacgagatgggtgaagcacgcttccgcaagatgtttgagcgtcaacttaaagctggtgaggttgcggataacgctgccgccaagcctctcatcactaccctactccctaagatgattgcacgcatcaacgactggtttgaggaagtgaaagctaagcgcggcaagcgcccgcgggccttccagttcctgcaagaaatcaagccggaagccgtagcgtacatcaccattaagaccactctggcttgcctaaccagtgcggacaatacaaccgttcaggctgtagcaagcgcaatcggtcgggccattgaggacgaggctcgcttcggtcgtatccgtgaccttgaagctaagcacttcaagaagaacgttgaggaacaactcaacaagcgcgtagggcacgtctacaagaaagcatttatgcaagttgtcgagcacgacatgctctctaagggtctactcggtggcgaggcgtggtcttcgtggcataaggaagactctattcatgtaggagtacgctgcatcgagatgctcattgagtcaaccggaatggttagcttacaccgccaaaatgctggcgtagtgggtgcagactctgagactatcgaactcgcacctgaatacgctgaggctatcgcaacccgtgcaggtgcgctggctggcatctctccgatgttccaaccttgcgtagttcctcctaagccgtggactggcattactggtggtggctattgggctgcggggcgcaaacccctgcagttagtacgtactcgcagtctggcggcgcttcgccgctatgaagaagtgtcgatgccggaggtcatcaaagcagtcaacattgcgcagaatacagcatggcgtattaacaagaaagttctcgacgtagcgaataccatcacccaatggcagcactgtccagtcgcggatgtgcctgcgatggatcgtggcgaaatgccagctcgtccgttggacatcgataccaacgagattgcacttaaagcgtggaagaaagaagcttccgcgttctaccgcaaagacaaagcacgcatgagccgtcgtctgtcgatggagtttatgttatctcaggcgaacaagtttgcgaattatgaggcaatctggtttccgcaaaacatggattggcgtgggcgcgtgtacgctgtcccgatgttcaatcctcagggcaacgatatgacgaaaggcctgctgacctttgcgcaggagaaacccattggtgaagacggcttctattggctcaagattcatggcgcaaatacagctggagtggataaagtaccgtttccacaacgcatcaaatttgttgaggataaccatacgaatattatggaatgcgcgaaagcaccgctggaaaacacttggtgggcggaacaggactcgccgttctgctttctggcgttctgctttgagtatgctggcgtcatcaatagtggtctgtcgtacaactgtagcttgcctctggcatttgatggtagttgctccggcctgcaacatttctcagcgatgttacgcgacgaaattggcggcaaagctgtgaatctcctcccatctgcggaataccaggatatttatcgtatcgtcagcgacaaagttaacgagatgctgaaacaagatctgattaacggtacctctaccaccgtggaaacggtgactgataaaaagacaggcgaaattacccaacgcacgaaatacgggaccaaagttatggcacagtggtggttagaacacggtgtgaatcgtggcgtcacgaaacgcccggttatgactttggtgtatgggagcaaagagtttggattccgcgatcaagtgctgagtgacaccattcaaccggcgatcgataacggcaagggtgacatgtttctgaatccgaatcaggctgctggttacatggcgaaactgatctggaacgcagtgtccgggaccgtagtcgcagcagttgaggcgatgaactggctgaaaagtgcggcgaaattacttgctgctgaagtgaaggatgagaagacggatacagttctgcgtggccgctgcgcagtacattgggtgactcccgacggcttccctgtgtggcaggaatacaagaagcctattcaaacgcgcttgaacctgatgttcctcggtcagttccgcttacagcctaccattaacaccaacaaagatagcgagattgatgcacgcaaacaggtgtctggtatcgctcctaactttgtacacagcctggacggtaaccaccttcgtatgactgtagtgtgggcacacgagaagtacggaatcgaatcttttgcactgattcacgactccttcggtaccattccggctgacgctgcgaacctgttcaaagcagtgcgcgaaactttcgttgacacatatgagtcttgtgatgtactggctgatttctacgaccagattgctgaccagttgcacgagtctcaacgcgacaaaatgccagcacttccggctaaaggtaagttgaacctccgtgacatcttaaaatcggacttcgcgttcgcg

SEQ ID NO: 1664 - protein, 890 aa, synthetic construct
  REGION 1..890: note = Variant of RNA polymerase
MHHHHHHMNTINIAKNDFSDIELAAIPFNTLADHYGERLAREQLALEHESYEMGEARFRKMFERQLKAGEVADNAAAKPLITTLLPKMIARINDWFEEVKAKRGKRPRAFQFLQEIKPEAVAYITIKTTLACLTSADNTTVQAVASAIGRAIEDEARFGRIRDLEAKHFKKNVEEQLNKRVGHVYKKAFMQVVEHDMLSKGLLGGEAWSSWHKEDSIHVGVRCIEMLIESTGMVSLHRQNAGVVGADSETIELAPEYAEAIATRAGALAGISPMFQPCVVPPKPWTGITGGGYWAAGRKPLQLVRTRSLAALRRYEEVSMPEVIKAVNIAQNTAWRINKKVLDVANTITQWQHCPVADVPAMDRGEMPARPLDIDTNEIALKAWKKEASAFYRKDKARMSRRLSMEFMLSQANKFANYEAIWFPQNMDWRGRVYAVPMFNPQGNDMTKGLLTFAQEKPIGEDGFYWLKIHGANTAGVDKVPFPQRIKFVEDNHTNIMECAKAPLENTWWAEQDSPFCFLAFCFEYAGVINSGLSYNCSLPLAFDGSCSGLQHFSAMLRDEIGGKAVNLLPSAEYQDIYRIVSDKVNEMLKQDLINGTSTTVETVTDKKTGEITQRTKYGTKVMAQWWLEHGVNRGVTKRPVMTLVYGSKEFGFRDQVLSDTIQPAIDNGKGDMFLNPNQAAGYMAKLIWNAVSGTVVAAVEAMNWLKSAAKLLAAEVKDEKTDTVLRGRCAVHWVTPDGFPVWQEYKKPIQTRLNLMFLGQFRLQPTINTNKDSEIDARKQVSGIAPNFVHSLDGNHLRMTVVWAHEKYGIESFALIHDSFGTIPADAANLFKAVRETFVDTYESCDVLADFYDQIADQLHESQRDKMPALPAKGKLNLRDILKSDFAFA

SEQ ID NO: 1665 - DNA, 2670 bp, synthetic construct
  misc_feature 1..2670: note = Variant of RNA polymerase
  source 1..2670: mol_type = other DNA
atgcaccatcaccatcaccatatgaacacgattaacattgctaagaacgacttctctgacatcgaactggctgctatcccgttcaacactctggctgaccattacggtgagcgtttagctcgcgaacagttggcccttgagcatgagtcttacgagatgggtgaagcacgcttccgcaagatgtttgagcgtcaacttaaagctggtgaggttgcggataacgctgccgccaagcctctcatcactaccctactccctaagatgattgcacgcatcaacgactggtttgaggaagtgaaagctaagcgcggcaagcgcccgacagccttccagttcctgcaagaaatcaagccggaagccgtagcgtacatcaccattaagaccactctggcttgcctaaccagtgcggacaatacaaccgttcaggctgtagcaagcgcaatcggtcgggccattgaggacgaggctcgcttcggtcgtatccgtgaccttgaagctaagcacttcaagaagaacgttgaggaacaactcaacaagcgcgtagggcacgtctacaagaaagcatttatgcaagttgtcgagcacgacatgctctctaagggtctactcggtggcgaggcgtggtcttcgtggcataaggaagactctattcatgtaggagtacgctgcatcgagatgctcattgagtcaaccggaatggttagcttacaccgccaaaatgctggcgtagtgggtgcagactctgagactatcgaactcgcacctgaatacgctgaggctatcgcaacccgtgcaggtgcgctggctggcatctctccgatgttccaaccttgcgtagttcctcctaagccgtggactggcattactggtggtggctattgggctgcggggcgcaaacccctgcagttagtacgtactcgcagtctggcggcgcttcgccgctatgaagaagtgtcgatgccggaggtcatcaaagcagtcaacattgcgcagaatacagcatggcgtattaacaagaaagttctcgacgtagcgaataccatcacccaatggcagcactgtccagtcgccgatattcctgcgatggatcgtggcgaaatgccagctcgtccgttggacatcgataccaacgagattgcacttaaagcgtggaagaaagaggcttcggcgttctaccgcaaagacaaagcacgcatgagccgtcgtctgtcgatggagtttatgttatctcaggcgaacaagtttgcgaattatgaggcaatctggtttccgcaaaacatggattggcgtgggcgcgtgtacgctgtcccgatgttcaatcctcagggcaacgatatgacgaaaggcctgctgacctttgcgcaggagaaacccattggtgaagacggcttctattggctcaagattcatggcgcaaatacagctggagtggataaagtaccgtttccacaacgcatcaaatttgttgaggataaccatacgaatattatggaatgcgcgaaagcaccgctggaaaacacttggtgggcggaacaggactcgccgttctgctttctggcgttctgctttgagtatgctggcgtcatcaatagtggtctgtcgtacaactgtagcttgcctctggcatttgatggtagttgctccggcctgcaacatttctcagcgatgttacgcgacgaaattggcggcaaagctgtgaatctcctcccatctgcggaataccaggatatttatcgtatcgtcagcgacaaagttaacgagatgctgaaacaagatctgattaacggtacctctaccaccgtggaaacggtgactgataaaaagacaggcgaaattacccaacgcacgaaatacgggaccaaagttatggcagggtggtggttagaacacggtgtgaatcgtggcgtcacgaaacgcccggttatgactttggtgtatgggagcaaagagtttggattccgcgatcaagtgctgagtgacaccattcaaccggcgatcgataacggcaagggtgacatgtttctgaatccgaatcaggctgctggttacatggcgaaactgatctggaacgcggtgtccgggaccgtagtcgcagcagttgaggcgatgaactggctgaaaagtgcggcgaaattacttgctgctgaagtgaaggatgagaagacggatacagttctgcgtggccgctgcgcagtacattgggtgactcccgacggcttccctgtgtggcaggaatacaagaagcctattcaaacgcgcttgaacctgatgttcctcggtcagttccgcttacagcctaccattaacaccaacaaagatagcgagattgatgcacgcaaacaggtgtctggtatcgctcctaactttgtacacagcctggacggtaaccaccttcgtatgactgtagtgtgggcacacgagaagtacggaatcgaatcttttgcactgattcacgactccttcggtaccattccggctgacgctgcgaacctgttcaaagcagtgcgcgaaactttcgttgacacatatgagtcttgtgatgtactggctgatttctacgaccagattgctgaccagttgcacgagtctcaacgcgacaaaatgccagcacttccggctaaaggtaagttgaacctccgtgacatcttaaaatcggacttcgcgttcgcg

SEQ ID NO: 1666 - protein, 890 aa, synthetic construct
  REGION 1..890: note = Variant of RNA polymerase
MHHHHHHMNTINIAKNDFSDIELAAIPFNTLADHYGERLAREQLALEHESYEMGEARFRKMFERQLKAGEVADNAAAKPLITTLLPKMIARINDWFEEVKAKRGKRPTAFQFLQEIKPEAVAYITIKTTLACLTSADNTTVQAVASAIGRAIEDEARFGRIRDLEAKHFKKNVEEQLNKRVGHVYKKAFMQVVEHDMLSKGLLGGEAWSSWHKEDSIHVGVRCIEMLIESTGMVSLHRQNAGVVGADSETIELAPEYAEAIATRAGALAGISPMFQPCVVPPKPWTGITGGGYWAAGRKPLQLVRTRSLAALRRYEEVSMPEVIKAVNIAQNTAWRINKKVLDVANTITQWQHCPVADIPAMDRGEMPARPLDIDTNEIALKAWKKEASAFYRKDKARMSRRLSMEFMLSQANKFANYEAIWFPQNMDWRGRVYAVPMFNPQGNDMTKGLLTFAQEKPIGEDGFYWLKIHGANTAGVDKVPFPQRIKFVEDNHTNIMECAKAPLENTWWAEQDSPFCFLAFCFEYAGVINSGLSYNCSLPLAFDGSCSGLQHFSAMLRDEIGGKAVNLLPSAEYQDIYRIVSDKVNEMLKQDLINGTSTTVETVTDKKTGEITQRTKYGTKVMAGWWLEHGVNRGVTKRPVMTLVYGSKEFGFRDQVLSDTIQPAIDNGKGDMFLNPNQAAGYMAKLIWNAVSGTVVAAVEAMNWLKSAAKLLAAEVKDEKTDTVLRGRCAVHWVTPDGFPVWQEYKKPIQTRLNLMFLGQFRLQPTINTNKDSEIDARKQVSGIAPNFVHSLDGNHLRMTVVWAHEKYGIESFALIHDSFGTIPADAANLFKAVRETFVDTYESCDVLADFYDQIADQLHESQRDKMPALPAKGKLNLRDILKSDFAFA

SEQ ID NO: 1667 - DNA, 2670 bp, synthetic construct
  misc_feature 1..2670: note = Variant of RNA polymerase
  source 1..2670: mol_type = other DNA
atgcaccatcaccatcaccatatgaacacgattaacattgctaagaacgacttctctgacatcgaactggctgctatcccgttcaacactctggctgaccattacggtgagcgtttagctcgcgaacagttggcccttgagcatgagtcttacgagatgggtgaagcacgcttccgcaagatgtttgagcgtcaacttaaagctggtgaggttgcggataacgctgccgccaagcctctcatcactaccctactccctaagatgattgcacgcatcaacgactggtttgaggaagtgaaagctaagcgcggcaagcgcccgacagccttccagttcctgcaagaaatcaagccggaagccgtagcgtacatcaccattaagaccactctggcttgcctaaccagtgcggacaatacaaccgttcaggctgtagcaagcgcaatcggtcgggccattgaggacgaggctcgcttcggtcgtatccgtgaccttgaagctaagcacttcaagaagaacgttgaggaacaactcaacaagcgcgtagggcacgtctacaagaaagcatttatgcaagttgtcgagcacgacatgctctctaagggtctactcggtggcgaggcgtggtcttcgtggcataaggaagactctattcatgtaggagtacgctgcatcgagatgctcattgagtcaaccggaatggttagcttacaccgccaaaatgctggcgtagtgggtgcagactctgagactatcgaactcgcacctgaatacgctgaggctatcgcaacccgtgcaggtgcgctggctggcatctctccgatgttccaaccttgcgtagttcctcctaagccgtggactggcattactggtggtggctattgggctgcggggcgcaaacccctgcagttagtacgtactcgcagtctgtttgcgcttcgccgctatgaagaagtgtcgatgccggaggtcatcaaagcagtcaacattgcgcagaatacagcatggcgtattaacaagaaagttctcgacgtagcgaataccatcacccaatggcagcactgtccagtcgcggatgtgcctgcgatggatcgtggcgaaatgccagctcgtccgttggacatcgataccaacgagattgcacttaaagcgtggaagaaagaagcttccgcgttctaccgcaaagacaaagcacgcatgagccgtcgtctgtcgatggagtttatgttatctcaggcgaacaagtttgcgaattatgaggcaatctggtttccgcaaaacatggattggcgtgggcgcgtgtacgctgtcccgatgttcaatcctcagggcaacgatatgacgaaaggcctgctgacctttgcgcaggagaaacccattggtgaagacggcttctattggctcaagattcatggcgcaaatacagctggagtggataaagtaccgtttccacaacgcatcaaatttgttgaggataaccatacgaatattatggaatgcgcgaaagcaccgctggaaaacacttggtgggcggaacaggactcgccgttctgctttctggcgttctgctttgagtatgctggcgtcatcaatagtggtctgtcgtacaactgtagcttgcctctggcatttgatggtagttgctccggcctgcaacatttctcagcgatgttacgcgacgaaattggcggcaaagctgtgaatctcctcccatctgcggaataccaggatatttatcgtatcgtcagcgacaaagttaacgagatgctgaaacaagatctgattaacggtacctctaccaccgtggaaacggtgactgataaaaagacaggcgaaattacccaacgcacgaaatacgggaccaaagttatggcacagtggtggttagaacacggtgtgaatcgtggcgtcacgaaacgcccggttatgactttggtgtatgggagcaaagagtttggattccgcgatcaagtgctgagtgacaccattcaaccggcgatcgataacggcaagggtgacatgtttctgaatccgaatcaggctgctggttacatggcgaaactgatctggaacgcagtgtccgggaccgtagtcgcagcagttgaggcgatgaactggctgaaaagtgcggcgaaattacttgctgctgaagtgaaggatgagaagacggatacagttctgcgtggccgctgcgcagtacattgggtgactcccgacggcttccctgtgtggcaggaatacaagaagcctattcaaacgcgcttgaacctgatgttcctcggtcagttccgcttacagcctaccattaacaccaacaaagatagcgagattgatgcacgcaaacaggtgtctggtatcgctcctaactttgtacacagcctggacggtaaccaccttcgtatgactgtagtgtgggcacacgagaagtacggaatcgaatcttttgcactgattcacgactccttcggtaccattccggctgacgctgcgaacctgttcaaagcagtgcgcgaaactttcgttgacacatatgagtcttgtgatgtactggctgatttctacgaccagattgctgaccagttgcacgagtctcaacgcgacaaaatgccagcacttccggctaaaggtaagttgaacctccgtgacatcttaaaatcggacttcgcgttcgcg

SEQ ID NO: 1668 - protein, 890 aa, synthetic construct
  REGION 1..890: note = Variant of RNA polymerase
MHHHHHHMNTINIAKNDFSDIELAAIPFNTLADHYGERLAREQLALEHESYEMGEARFRKMFERQLKAGEVADNAAAKPLITTLLPKMIARINDWFEEVKAKRGKRPTAFQFLQEIKPEAVAYITIKTTLACLTSADNTTVQAVASAIGRAIEDEARFGRIRDLEAKHFKKNVEEQLNKRVGHVYKKAFMQVVEHDMLSKGLLGGEAWSSWHKEDSIHVGVRCIEMLIESTGMVSLHRQNAGVVGADSETIELAPEYAEAIATRAGALAGISPMFQPCVVPPKPWTGITGGGYWAAGRKPLQLVRTRSLFALRRYEEVSMPEVIKAVNIAQNTAWRINKKVLDVANTITQWQHCPVADVPAMDRGEMPARPLDIDTNEIALKAWKKEASAFYRKDKARMSRRLSMEFMLSQANKFANYEAIWFPQNMDWRGRVYAVPMFNPQGNDMTKGLLTFAQEKPIGEDGFYWLKIHGANTAGVDKVPFPQRIKFVEDNHTNIMECAKAPLENTWWAEQDSPFCFLAFCFEYAGVINSGLSYNCSLPLAFDGSCSGLQHFSAMLRDEIGGKAVNLLPSAEYQDIYRIVSDKVNEMLKQDLINGTSTTVETVTDKKTGEITQRTKYGTKVMAQWWLEHGVNRGVTKRPVMTLVYGSKEFGFRDQVLSDTIQPAIDNGKGDMFLNPNQAAGYMAKLIWNAVSGTVVAAVEAMNWLKSAAKLLAAEVKDEKTDTVLRGRCAVHWVTPDGFPVWQEYKKPIQTRLNLMFLGQFRLQPTINTNKDSEIDARKQVSGIAPNFVHSLDGNHLRMTVVWAHEKYGIESFALIHDSFGTIPADAANLFKAVRETFVDTYESCDVLADFYDQIADQLHESQRDKMPALPAKGKLNLRDILKSDFAFA

SEQ ID NO: 1669 - DNA, 2670 bp, synthetic construct
  misc_feature 1..2670: note = Variant of RNA polymerase
  source 1..2670: mol_type = other DNA
atgcaccatcaccatcaccatatgaacacgattaacattgctaagaacgacttctctgacatcgaactggctgctatcccgttcaacactctggctgaccattacggtgagcgtttagctcgcgaacagttggcccttgagcatgagtcttacgagatgggtgaagcacgcttccgcaagatgtttgagcgtcaacttaaagctggtgaggttgcggataacgctgccgccaagcctctcatcactaccctactccctaagatgattgcacgcatcaacgactggtttgaggaagtgaaagctaagcgcggcaagcgcccgacagccttccagttcctgcaagaaatcaagccggaagccgtagcgtacatcaccattaagaccactctggcttgcctaaccagtgcggacaatacaaccgttcaggctgtagcaagcgcaatcggtcgggccattgaggacgaggctcgcttcggtcgtatccgtgaccttgaagctaagcacttcaagaagaacgttgaggaacaactcaacaagcgcgtagggcacgtctacaagaaagcatttatgcaagttgtcgagcacgacatgctctctaagggtctactcggtggcgaggcgtggtcttcgtggcataaggaagactctattcatgtaggagtacgctgcatcgagatgctcattgagtcaaccggaatggttagcttacaccgccaaaatgctggcgtagtgggtgcagactctgagactatcgaactcgcacctgaatacgctgaggctatcgcaacccgtgcaggtgcgctggctggcatctctccgatgttccaaccttgcgtagttcctcctaagccgtggactggcattactggtggtggctattgggctgcggggcgcaaacccctgcagttagtacgtactcgcagtctggcggcgcttcgccgctatgaagaagtgtcgatgccggaggtcatcaaagcagtcaacattgcgcagaatacagcatggcgtattaacaagaaagttctcgacgtagcgaataccatcacccaatggcagcactgtccagtcgcggatgtgcctgcgatggatcgtggcgaaatgccagctcgtccgttggacatcgataccaacgagattgcacttaaagcgtggaagaaagaagcttccgcgttctaccgcaaagacaaagcacgcatgagccgtcgtctgtcgatggagtttatgttatctcaggcgaacaagtttgcgaattatgaggcaatctggtttccgcaaaacatggattggcgtgggcgcgtgtacgctgtcccgatgttcaatcctcagggcaacgatatgacgaaaggcctgctgacctttgcgcaggagaaacccattggtgaagacggcttctattggctcaagattcatggcgcaaatacagctggagtggataaagtaccgtttccacaacgcatcaaatttgttgaggataaccatacgaatattatggaatgcgcgaaagcaccgctggaaaacacttggtgggcggaacaggactcgccgttctgctttctggcgttctgctttgagtatgctggcgtcatcaatagtggtctgtcgtacaactgtagcttgcctctggcatttgatggtagttgctccggcctgcaacatttctcagcgatgttacgcgacgaaattggcggcaaagctgtgaatctcctcccatctgcggaataccaggatatttatcgtatcgtcagcgacaaagttaacgagatgctgaaacaagatctgattaacggtacctctaccaccgtggaaacggtgactgataaaaagacaggcgaaattacccaacgcacgaaatacgggaccaaagttatggcacagtggtggttagaacacggtgtgaatcgtggcgtcacgaaacgcccggttatgactttggtgtatgggagcaaagagtttggattccgcgatcaagtgctgagtgacaccattcaaccgggtatcgataacggcaagggtgacatgtttctgaatccgaatcaggctgctggttacatggcgaaactgatctggaacgcagtgtccgggaccgtagtcgcagcagttgaggcgatgaactggctgaaaagtgcggcgaaattacttgctgctgaagtgaaggatgagaagacggatacagttctgcgtggccgctgcgcagtacattgggtgactcccgacggcttccctgtgtggcaggaatacaagaagcctattcaaacgcgcttgaacctgatgttcctcggtcagttccgcttacagcctaccattaacaccaacaaagatagcgagattgatgcacgcaaacaggtgtctggtatcgctcctaactttgtacacagcctggacggtaaccaccttcgtatgactgtagtgtgggcacacgagaagtacggaatcgaatcttttgcactgattcacgactccttcggtaccattccggctgacgctgcgaacctgttcaaagcagtgcgcgaaactttcgttgacacatatgagtcttgtgatgtactggctgatttctacgaccagattgctgaccagttgcacgagtctcaacgcgacaaaatgccagcacttccggctaaaggtaagttgaacctccgtgacatcttaaaatcggacttcgcgttcgcg

SEQ ID NO: 1670 - protein, 890 aa, synthetic construct
  REGION 1..890: note = Variant of RNA polymerase
MHHHHHHMNTINIAKNDFSDIELAAIPFNTLADHYGERLAREQLALEHESYEMGEARFRKMFERQLKAGEVADNAAAKPLITTLLPKMIARINDWFEEVKAKRGKRPTAFQFLQEIKPEAVAYITIKTTLACLTSADNTTVQAVASAIGRAIEDEARFGRIRDLEAKHFKKNVEEQLNKRVGHVYKKAFMQVVEHDMLSKGLLGGEAWSSWHKEDSIHVGVRCIEMLIESTGMVSLHRQNAGVVGADSETIELAPEYAEAIATRAGALAGISPMFQPCVVPPKPWTGITGGGYWAAGRKPLQLVRTRSLAALRRYEEVSMPEVIKAVNIAQNTAWRINKKVLDVANTITQWQHCPVADVPAMDRGEMPARPLDIDTNEIALKAWKKEASAFYRKDKARMSRRLSMEFMLSQANKFANYEAIWFPQNMDWRGRVYAVPMFNPQGNDMTKGLLTFAQEKPIGEDGFYWLKIHGANTAGVDKVPFPQRIKFVEDNHTNIMECAKAPLENTWWAEQDSPFCFLAFCFEYAGVINSGLSYNCSLPLAFDGSCSGLQHFSAMLRDEIGGKAVNLLPSAEYQDIYRIVSDKVNEMLKQDLINGTSTTVETVTDKKTGEITQRTKYGTKVMAQWWLEHGVNRGVTKRPVMTLVYGSKEFGFRDQVLSDTIQPGIDNGKGDMFLNPNQAAGYMAKLIWNAVSGTVVAAVEAMNWLKSAAKLLAAEVKDEKTDTVLRGRCAVHWVTPDGFPVWQEYKKPIQTRLNLMFLGQFRLQPTINTNKDSEIDARKQVSGIAPNFVHSLDGNHLRMTVVWAHEKYGIESFALIHDSFGTIPADAANLFKAVRETFVDTYESCDVLADFYDQIADQLHESQRDKMPALPAKGKLNLRDILKSDFAFA

SEQ ID NO: 1671 - DNA, 2670 bp, synthetic construct
  misc_feature 1..2670: note = Variant of RNA polymerase
  source 1..2670: mol_type = other DNA
atgcaccatcaccatcaccatatgaacacgattaacattgctaagaacgacttctctgacatcgaactggctgctatcccgttcaacactctggctgaccattacggtgagcgtttagctcgcgaacagttggcccttgagcatgagtcttacgagatgggtgaagcacgcttccgcaagatgtttgagcgtcaacttaaagctggtgaggttgcggataacgctgccgccaagcctctcatcactaccctactccctaagatgattgcacgcatcaacgactggtttgaggaagtgaaagctaagcgcggcaagcgcccgacagccttccagttcctgcaagaaatcaagccggaagccgtagcgtacatcaccattaagaccactctggcttgcctaaccagtgcggacaatacaaccgttcaggctgtagcaagcgcaatcggtcgggccattgaggacgaggctcgcttcggtcgtatccgtgaccttgaagctaagcacttcaagaagaacgttgaggaacaactcaacaagcgcgtagggcacgtctacaagaaagcatttatgcaagttgtcgagcacgacatgctctctaagggtctactcggtggcgaggcgtggtcttcgtggcataaggaagactctattcatgtaggagtacgctgcatcgagatgctcattgagtcaaccggaatggttagcttacaccgccaaaatgctggcgtagtgggtgcagactctgagactatcgaactcgcacctgaatacgctgaggctatcgcaacccgtgcaggtgcgctggctggcatctctccgatgttccaaccttgcgtagttcctcctaagccgtggactggcattactggtggtggctattgggctgcggggcgcaaacccctgcagttagtacgtactcgcagtctgaaggcgcttcgccgctatgaagaagtgtcgatgccggaggtcatcaaagcagtcaacattgcgcagaatacagcatggcgtattaacaagaaagttctcgacgtagcgaataccatcacccaatggcagcactgtccagtcgcggatgtgcctgcgatggatcgtggcgaaatgccagctcgtccgttggacatcgataccaacgagattgcacttaaagcgtggaagaaagaagcttccgcgttctaccgccgcgacaaagcacgcatgagccgtcgtctgtcgatggagtttatgttatctcaggcgaacaagtttgcgaattatgaggcaatctggtttccgcaaaacatggattggcgtgggcgcgtgtacgctgtcccgatgttcaatcctcagggcaacgatatgacgaaaggcctgctgacctttgcgcaggagaaacccattggtgaagacggcttctattggctcaagattcatggcgcaaatacagctggagtggataaagtaccgtttccacaacgcatcaaatttattgaggataaccatacgaatattatggaatgcgcgaaagcaccgctggaaaacacttggtgggcggaacaggactcgccgttctgctttctggcgttctgctttgagtatgctggcgtcatcaatagtggtctgtcgtacaactgtagcttgcctctggcatttgatggtagttgctccggcctgcaacatttctcagcgatgttacgcgacgaaattggcggcaaagctgtgaatctcctcccatctgcggaataccaggatatttatggtatcgtcagcgacaaagttaacgagatgctgaaacaagatctgattaacggtacctctaccaccgtggaaacggtgactgataaaaagacaggcgaaattacccaacgcacgaaatacgggaccaaagttatggcacagtggtggttagagcacggtgtgacccgtggcgtcacgaaacgcccggttatgactttggtgtatgggagcaaagagtttggattccgcgatcaagtgctgagtgacaccattcaaccggcgatcgataacggcaagggtgacatgtttctgaatccgaatcaggctgctggttacatggcgaaactgatctggaactcggtgtccgggaccgtagtcgcagcagttgaggcgatgaactggctgaaaagtgcggcgaaattacttgctgctgaagtgaaggatgagaagacggatacagttctgcgtggccgctgcgcagtacattgggtgactcccgacggcttccctgtgtggcaggaatacaagaagcctattcaaacgcgcttgaacctgatgttcctcggtcagttccgcttacagcctaccattaacaccaacaaagatagcgagattgatgcacgcaaacaggtgtctggtatcgctcctaactttgtacacagcctggacggtaaccaccttcgtatgactgtagtgtgggcacacgagaagtacggaatcgaatcttttgcactgattcacgactccttcggtaccattccggctgacgctgcgaacctgttcaaagcagtgcgcgaaactttcgttgacacatatgagtcttgtgatgtactggctgatttctacgaccagattgctgaccagttgcacgagtctcaacgcgacaaaatgccagcacttccggctaaaggtaagttgaacctccgtgacatcttaaaatcggacttcgcgttcgcg

SEQ ID NO: 1672 - protein, 890 aa, synthetic construct
  REGION 1..890: note = Variant of RNA polymerase
MHHHHHHMNTINIAKNDFSDIELAAIPFNTLADHYGERLAREQLALEHESYEMGEARFRKMFERQLKAGEVADNAAAKPLITTLLPKMIARINDWFEEVKAKRGKRPTAFQFLQEIKPEAVAYITIKTTLACLTSADNTTVQAVASAIGRAIEDEARFGRIRDLEAKHFKKNVEEQLNKRVGHVYKKAFMQVVEHDMLSKGLLGGEAWSSWHKEDSIHVGVRCIEMLIESTGMVSLHRQNAGVVGADSETIELAPEYAEAIATRAGALAGISPMFQPCVVPPKPWTGITGGGYWAAGRKPLQLVRTRSLKALRRYEEVSMPEVIKAVNIAQNTAWRINKKVLDVANTITQWQHCPVADVPAMDRGEMPARPLDIDTNEIALKAWKKEASAFYRRDKARMSRRLSMEFMLSQANKFANYEAIWFPQNMDWRGRVYAVPMFNPQGNDMTKGLLTFAQEKPIGEDGFYWLKIHGANTAGVDKVPFPQRIKFIEDNHTNIMECAKAPLENTWWAEQDSPFCFLAFCFEYAGVINSGLSYNCSLPLAFDGSCSGLQHFSAMLRDEIGGKAVNLLPSAEYQDIYGIVSDKVNEMLKQDLINGTSTTVETVTDKKTGEITQRTKYGTKVMAQWWLEHGVTRGVTKRPVMTLVYGSKEFGFRDQVLSDTIQPAIDNGKGDMFLNPNQAAGYMAKLIWNSVSGTVVAAVEAMNWLKSAAKLLAAEVKDEKTDTVLRGRCAVHWVTPDGFPVWQEYKKPIQTRLNLMFLGQFRLQPTINTNKDSEIDARKQVSGIAPNFVHSLDGNHLRMTVVWAHEKYGIESFALIHDSFGTIPADAANLFKAVRETFVDTYESCDVLADFYDQIADQLHESQRDKMPALPAKGKLNLRDILKSDFAFA

SEQ ID NO: 1673 - DNA, 2670 bp, synthetic construct
  misc_feature 1..2670: note = Variant of RNA polymerase
  source 1..2670: mol_type = other DNA
atgcaccatcaccatcaccatatgaacacgattaacattgctaagaacgacttctctgacatcgaactggctgctatcccgttcaacactctggctgaccattacggtgagcgtttagctcgcgaacagttggcccttgagcatgagtcttacgagatgggtgaagcacgcttccgcaagatgtttgagcgtcaacttaaagctggtgaggttgcggataacgctgccgccaagcctctcatcactaccctactccctaagatgattgcacgcatcaacgactggtttgaggaagtgaaagctaagcgcggcaagcgcccgacagccttccagttcctgcaagaaatcaagccggaagccgtagcgtacatcaccattaagaccactctggcttgcctaaccagtgcggacaatacaaccgttcaggctgtagcaagcgcaatcggtcgggccattgaggacgaggctcgcttcggtcgtatccgtgaccttgaagctaagcacttcaagaagaacgttgaggaacaactcaacaagcgcgtagggcacgtctacaagaaagcatttatgcaagttgtcgagcacgacatgctctctaagggtctactcggtggcgaggcgtggtcttcgtggcataaggaagactctattcatgtaggagtacgctgcatcgagatgctcattgagtcaaccggaatggttagcttacaccgccaaaatgctggcgtagtgggtgcagactctgagactatcgaactcgcacctgaatacgctgaggctatcgcaacccgtgcaggtgcgctggctggcatctctccgatgttccaaccttgcgtagttcctcctaagccgtggactggcattactggtggtggctattgggctgcggggcgcaaacccctgcagttagtacgtactcgcagtctggcggcgcttcgccgctatgaagaagtgtcgatgccggaggtcatcaaagcagtcaacattgcgcagaatacagcatggcgtattaacaagaaagttctcgacgtagcgaataccatcacccaatggcagcactgtccagtcgcggatgtgcctgcgatcgatcgtggcgaaatgccagctcgtccgttggacatcgataccaacgagattgcacttaaagcgtggaagaaagaagcttccgcgttctaccgccgcgacaaagcacgcatgagccgtcgtctgtcgatggagtttatgttatctcaggcgaacaagtttgcgaattatgaggcaatctggtttccgcaaaacatggattggcgtgggcgcgtgtacgctgtcccgatgttcaatcctcagggcaacgatatgacgaaaggcctgctgacctttgcgcaggagaaacccattggtgaagacggcttctattggctcaagattcatggcgcaaatacagctggagtggataaagtaccgtttccacaacgcatcaaatttgttgaggataaccatacgaatattatggaatgcgcgaaagcaccgctggaaaacacttggtgggcggaacaggactcgccgttctgctttctggcgttctgctttgagtatgctggcgtcatcaatagtggtctgtcgtacaactgtagcttgcctctggcatttgatggtagttgctccggcctgcaacatttctcagcgatgttacgcgacgaagttggcggcaaagctgtgaatctcctcccatctgcggaataccaggatatttatcgtatcgtcagcgacaaagttaacgagatgctgaaacaagatctgattaacggtacctctaccaccgtggaaacggtgactgataaaaagacaggcgaaattacccaacgcacgaaatacgggaccaaagttatggcagggtggtggttagaacacggtgtgaatcgtggcgtcacgaaacgcccggttatgactttggtgtatgggagcaaagagtttggattccgcgatcaagtgctgagtgacaccattcaaccggcgatcgataacggcaagggtgacatgtttctgaatccgaatcaggctgctggttacatggcgaaactgatctggaacgcagtgtccgggaccgtagtcgcagcagttgaggcgatgaactggctgaaaagtgcggcgaaattacttgctgctgaagtgaaggatgagaagacggatacagttctgcgtggccgctgcgcagtacattgggtgactcccgacggcttccctgtgtggcaggaatacaagaagcctattcaaacgcgcttgaacctgatgttcctcggtcagttccgcttacagcctaccattaacaccaacaaagatagcgagattgatgcacgcaaacaggtgtctggtatcgctcctaactttgtacacagcctggacggtaaccaccttcgtatgactgtagtgtgggcacacgagaagtacggaatcgaatcttttgcactgattcacgactccttcggtaccattccggctgacgctgcgaacctgttcaaagcagtgcgcgaaactttcgttgacacatatgagtcttgtgatgtactggctgatttctacgaccagattgctgaccagttgcacgagtctcaacgcgacaaaatgccagcacttccggctaaaggtaagttgaacctccgtgacatcttaaaatcggacttcgcgttcgcg

SEQ ID NO: 1674 - protein, 890 aa, synthetic construct
  REGION 1..890: note = Variant of RNA polymerase
MHHHHHHMNTINIAKNDFSDIELAAIPFNTLADHYGERLAREQLALEHESYEMGEARFRKMFERQLKAGEVADNAAAKPLITTLLPKMIARINDWFEEVKAKRGKRPTAFQFLQEIKPEAVAYITIKTTLACLTSADNTTVQAVASAIGRAIEDEARFGRIRDLEAKHFKKNVEEQLNKRVGHVYKKAFMQVVEHDMLSKGLLGGEAWSSWHKEDSIHVGVRCIEMLIESTGMVSLHRQNAGVVGADSETIELAPEYAEAIATRAGALAGISPMFQPCVVPPKPWTGITGGGYWAAGRKPLQLVRTRSLAALRRYEEVSMPEVIKAVNIAQNTAWRINKKVLDVANTITQWQHCPVADVPAIDRGEMPARPLDIDTNEIALKAWKKEASAFYRRDKARMSRRLSMEFMLSQANKFANYEAIWFPQNMDWRGRVYAVPMFNPQGNDMTKGLLTFAQEKPIGEDGFYWLKIHGANTAGVDKVPFPQRIKFVEDNHTNIMECAKAPLENTWWAEQDSPFCFLAFCFEYAGVINSGLSYNCSLPLAFDGSCSGLQHFSAMLRDEVGGKAVNLLPSAEYQDIYRIVSDKVNEMLKQDLINGTSTTVETVTDKKTGEITQRTKYGTKVMAGWWLEHGVNRGVTKRPVMTLVYGSKEFGFRDQVLSDTIQPAIDNGKGDMFLNPNQAAGYMAKLIWNAVSGTVVAAVEAMNWLKSAAKLLAAEVKDEKTDTVLRGRCAVHWVTPDGFPVWQEYKKPIQTRLNLMFLGQFRLQPTINTNKDSEIDARKQVSGIAPNFVHSLDGNHLRMTVVWAHEKYGIESFALIHDSFGTIPADAANLFKAVRETFVDTYESCDVLADFYDQIADQLHESQRDKMPALPAKGKLNLRDILKSDFAFA

SEQ ID NO: 1675 - DNA, 2670 bp, synthetic construct
  misc_feature 1..2670: note = Variant of RNA polymerase
  source 1..2670: mol_type = other DNA
atgcaccatcaccatcaccatatgaacacgattaacattgctaagaacgacttctctgacatcgaactggctgctatcccgttcaacactctggctgaccattacggtgagcgtttagctcgcgaacagttggcccttgagcatgagtcttacgagatgggtgaagcacgcttccgcaagatgtttgagcgtcaacttaaagctggtgaggttgcggataacgctgccgccaagcctctcatcactaccctactccctaagatgattgcacgcatcaacgactggtttgaggaagtgaaagctaagcgcggcaagcgcccgacagccttccagttcctgcaagaaatcaagccggaagccgtagcgtacatcaccattaagaccactctggcttgcctaaccagtgcggacaatacaaccgttcaggctgtagcaagcgcaatcggtcgggccattgaggacgaggctcgcttcggtcgtatccgtgaccttgaagctaagcacttcaagaagaacgttgaggaacaactcaacaagcgcgtagggcacgtctacaagaaagcatttatgcaagttgtcgagcacgacatgctctctaagggtctactcggtggcgaggcgtggtcttcgtggcataaggaagactctattcatgtaggagtacgctgcatcgagatgctcattgagtcaaccggaatggttagcttacaccgccaaaatgctggcgtagtgggtgcagactctgagactatcgaactcgcacctgaatacgctgaggctatcgcaacccgtgcaggtgcgctggctggcatctctccgatgttccaaccttgcgtagttcctcctaagccgtggactggcattactggtggtggctattgggctgcggggcgcaaacccctgcagttagtacgtactcgcagtctggcggcgtcgcgccgctatgaagaagtgtcgatgccggaggtcatcaaagcagtcaacattgcgcagaatacagcatggcgtattaacaagaaagttctcgacgtagcgaataccatcacccaatggcagcactgtccagtcgcggatgtgcctgcgatggatcgtggcgaaatgccagctcgtccgttggacatcgataccaacgagattgcacttaaagcgtggaagaaagaagcttccgcgttctaccgcaaagacaaagcacgcatgagccgtcgtctgtcgatggagtttatgttatctcaggcgaacaagtttgcgaattatgaggcaatctggtttccgcaaaacatggattggcgtgggcgcgtgtacgctgtcccgatgttcaatcctcagggcaacgatatgacgaaaggcctgctgacctttgcgcaggagaaacccattggtgaagacggcttctattggctcaagattcatggcgcaaatacagctggagtggataaagtaccgtttccacaacgcatcaaatttgttgaggataaccatacgaatattatggaatgcgcgaaagcaccgctggaaaacacttggtgggcggaacaggactcgccgttctgctttctggcgttctgctttgagtatgctggcgtcatcaatagtggtctgtcgtacaactgtagcttgcctctggcatttgatggtagttgctccggcctgcaacatttctcagcgatgttacgcgacgaaattggcggcaaagctgtgaatctcctcccatctgcggaataccaggatatttatcgtatcgtcagcgacaaagttaacgagatgctgaaacaagatctgattaacggtacctctaccaccgtggaaacggtgactgataaaaagacaggcgaaattacccaacgcacgaaatacgggaccaaagttatggcacagtggtggttagaacacggtgtgaatcgtggcgtcacgaaacgcccggttatgactttggtgtatgggagcaaagagtttggattccgcgatcaagtgctgagtgacaccattcaaccggcgatcgataacggcaagggtgacatgtttctgaatccgaatcaggctgctggttacatggcgaaactgatctggaacgcagtgtccgggaccgtagtcgcagcagttgaggcgatgaactggctgaaaagtgcggcgaaattacttgctgctgaagtgaaggatgagaagacggatacagttctgcgtggccgctgcgcagtacattgggtgactcccgacggcttccctgtgtggcaggaatacaagaagcctattcaaacgcgcttgaacctgatgttcctcggtcagttccgcttacagcctaccattaacaccaacaaagatagcgagattgatgcacgcaaacaggtgtctggtatcgctcctaactttgtacacagcctggacggtaaccaccttcgtatgactgtagtgtgggcacacgagaagtacggaatcgaatcttttgcactgattcacgactccttcggtaccattccggctgacgctgcgaacctgttcaaagcagtgcgcgaaactttcgttgacacatatgagtcttgtgatgtactggctgatttctacgaccagattgctgaccagttgcacgagtctcaacgcgacaaaatgccagcacttccggctaaaggtaagttgaacctccgtgacatcttaaaatcggacttcgcgttcgcg

SEQ ID NO: 1676 - protein, 890 aa, synthetic construct
  REGION 1..890: note = Variant of RNA polymerase
MHHHHHHMNTINIAKNDFSDIELAAIPFNTLADHYGERLAREQLALEHESYEMGEARFRKMFERQLKAGEVADNAAAKPLITTLLPKMIARINDWFEEVKAKRGKRPTAFQFLQEIKPEAVAYITIKTTLACLTSADNTTVQAVASAIGRAIEDEARFGRIRDLEAKHFKKNVEEQLNKRVGHVYKKAFMQVVEHDMLSKGLLGGEAWSSWHKEDSIHVGVRCIEMLIESTGMVSLHRQNAGVVGADSETIELAPEYAEAIATRAGALAGISPMFQPCVVPPKPWTGITGGGYWAAGRKPLQLVRTRSLAASRRYEEVSMPEVIKAVNIAQNTAWRINKKVLDVANTITQWQHCPVADVPAMDRGEMPARPLDIDTNEIALKAWKKEASAFYRKDKARMSRRLSMEFMLSQANKFANYEAIWFPQNMDWRGRVYAVPMFNPQGNDMTKGLLTFAQEKPIGEDGFYWLKIHGANTAGVDKVPFPQRIKFVEDNHTNIMECAKAPLENTWWAEQDSPFCFLAFCFEYAGVINSGLSYNCSLPLAFDGSCSGLQHFSAMLRDEIGGKAVNLLPSAEYQDIYRIVSDKVNEMLKQDLINGTSTTVETVTDKKTGEITQRTKYGTKVMAQWWLEHGVNRGVTKRPVMTLVYGSKEFGFRDQVLSDTIQPAIDNGKGDMFLNPNQAAGYMAKLIWNAVSGTVVAAVEAMNWLKSAAKLLAAEVKDEKTDTVLRGRCAVHWVTPDGFPVWQEYKKPIQTRLNLMFLGQFRLQPTINTNKDSEIDARKQVSGIAPNFVHSLDGNHLRMTVVWAHEKYGIESFALIHDSFGTIPADAANLFKAVRETFVDTYESCDVLADFYDQIADQLHESQRDKMPALPAKGKLNLRDILKSDFAFA

SEQ ID NO: 1677 - DNA, 2670 bp, synthetic construct
  misc_feature 1..2670: note = Variant of RNA polymerase
  source 1..2670: mol_type = other DNA
atgcaccatcaccatcaccatatgaacacgattaacattgctaagaacgacttctctgacatcgaactggctgctatcccgttcaacactctggctgaccattacggtgagcgtttagctcgcgaacagttggcccttgagcatgagtcttacgagatgggtgaagcacgcttccgcaagatgtttgagcgtcaacttaaagctggtgaggttgcggataacgctgccgccaagcctctcatcactaccctactccctaagatgattgcacgcatcaacgactggtttgaggaagtgaaagctaagcgcggcaagcgcccgacagccttccagttcctgcaagaaatcaagccggaagccgtagcgtacatcaccattaagaccactctggcttgcctaaccagtgcggacaatacaaccgttcaggctgtagcaagcgcaatcggtcgggccattgaggacgaggctcgcttcggtcgtatccgtgaccttgaagctaagcacttcaagaagaacgttgaggaacaactcaacaagcgcgtagggcacgtctacaagaaagcatttatgcaagttgtcgagcacgacatgctctctaagggtctactcggtggcgaggcgtggtcttcgtggcataaggaagactctattcatgtaggagtacgctgcatcgagatgctcattgagtcaaccggaatggttagcttacaccgccaaaatgctggcgtagtgggtgcagactctgagactatcgaactcgcacctgaatacgctgaggctatcgcaacccgtgcaggtgcgctggctggcatctctccgatgttccaaccttgcgtagttcctcctaagccgtggactggcattactggtggtggctattgggctgcggggcgcaaacccctgcagttagtacgtactcgcagtctgaaggcgcttcgccgctatgaagaagtgtcgatgccggaggtcatcaaagcagtcaacattgcgcagaatacagcatggcgtattaacaagaaagttctcgacgtagcgaataccatcacccaatggcagcactgtccagtcgcggatgttcctgcgatggatcgtggcgaaatgccagctcgtccgttggacatcgataccaaccctattgcacttaaagcgtggaagaaagaagcttccgcgttctaccgcaaagacaaagcacgcatgagccgtcgtctgtcgatggagtttatgttatctcaggcgaacaagtttgcgaattatgaggcaatctggtttccgcaaaacatggattggcgtgggcgcgtgtacgctgtcccgatgttcaatcctcagggcaacgatatgacgaaaggcctgctgacctttgcgcaggagaaacccattggtgaagacggcttctattggctcaagattcatggcgcaaatacagctggagtggataaagtaccgtttccacaacgcatcaaatttgttgaggataaccatacgaatattatggaatgcgcgaaagcaccgctggaaaacacttggtgggcggaacaggactcgccgttctgctttctggcgttctgctttgagtatgctggcgtcatcaatagtggtctgtcgtacaactgtagcttgcctctggcatttgatggtagttgctccggcctgcaacatttctcagcgatgttacgcgacgaaattggcggcaaagctgtgaatctcctcccatctgcggaataccaggatatttatcgtatcgtcagcgacaaagttaacgagatgctgaaacaagatctgattaacggtacctctaccaccgtggaaacggtgactgataaaaagacaggcgaaattacccaacgcacgaaatacgggaccaaagttatggcacaatggtggttagaacacggtgtgaatcgtggcgtcacgaaacgcccggttatgactttggtgtatgggagcaaagagtttggattccgcgatcaagtgctgagtgacaccattcaaccggcgatcgataacggcaagggtgacatgtttctgaatccgaatcaggctgctggttacatggcgaaactgatctggaactcggtgtccgggaccgtagtcgcagcagttgaggcgatgaactggctgaaaagtgcggcgaaattacttgctgctgaagtgaaggatgagaagacggatacagttctgcgtggccgctgcgcagtacattgggtgactcccgacggcttccctgtgtggcaggaatacaagaagcctattcaaacgcgcttgaacctgatgttcctcggtcagttccgcttacagcctaccattaacaccaacaaagatagcgagattgatgcacgcaaacaggtgtctggtatcgctcctaactttgtacacagcctggacggtaaccaccttcgtatgactgtagtgtgggcacacgagaagtacggaatcgaatcttttgcactgattcacgactccttcggtaccattccggctgacgctgcgaacctgttcaaagcagtgcgcgaaactttcgttgacacatatgagtcttgtgatgtactggctgatttctacgaccagattgctgaccagttgcacgagtctcaacgcgacaaaatgccagcacttccggctaaaggtaagttgaacctccgtgacatcttaaaatcggacttcgcgttcgcg

SEQ ID NO: 1678 - protein, 890 aa, synthetic construct
  REGION 1..890: note = Variant of RNA polymerase
MHHHHHHMNTINIAKNDFSDIELAAIPFNTLADHYGERLAREQLALEHESYEMGEARFRKMFERQLKAGEVADNAAAKPLITTLLPKMIARINDWFEEVKAKRGKRPTAFQFLQEIKPEAVAYITIKTTLACLTSADNTTVQAVASAIGRAIEDEARFGRIRDLEAKHFKKNVEEQLNKRVGHVYKKAFMQVVEHDMLSKGLLGGEAWSSWHKEDSIHVGVRCIEMLIESTGMVSLHRQNAGVVGADSETIELAPEYAEAIATRAGALAGISPMFQPCVVPPKPWTGITGGGYWAAGRKPLQLVRTRSLKALRRYEEVSMPEVIKAVNIAQNTAWRINKKVLDVANTITQWQHCPVADVPAMDRGEMPARPLDIDTNPIALKAWKKEASAFYRKDKARMSRRLSMEFMLSQANKFANYEAIWFPQNMDWRGRVYAVPMFNPQGNDMTKGLLTFAQEKPIGEDGFYWLKIHGANTAGVDKVPFPQRIKFVEDNHTNIMECAKAPLENTWWAEQDSPFCFLAFCFEYAGVINSGLSYNCSLPLAFDGSCSGLQHFSAMLRDEIGGKAVNLLPSAEYQDIYRIVSDKVNEMLKQDLINGTSTTVETVTDKKTGEITQRTKYGTKVMAQWWLEHGVNRGVTKRPVMTLVYGSKEFGFRDQVLSDTIQPAIDNGKGDMFLNPNQAAGYMAKLIWNSVSGTVVAAVEAMNWLKSAAKLLAAEVKDEKTDTVLRGRCAVHWVTPDGFPVWQEYKKPIQTRLNLMFLGQFRLQPTINTNKDSEIDARKQVSGIAPNFVHSLDGNHLRMTVVWAHEKYGIESFALIHDSFGTIPADAANLFKAVRETFVDTYESCDVLADFYDQIADQLHESQRDKMPALPAKGKLNLRDILKSDFAFA

SEQ ID NO: 1679 - DNA, 2670 bp, synthetic construct
  misc_feature 1..2670: note = Variant of RNA polymerase
  source 1..2670: mol_type = other DNA
atgcaccatcaccatcaccatatgaacacgattaacattgctaagaacgacttctctgacatcgaactggctgctatcccgttcaacactctggctgaccattacggtgagcgtttagctcgcgaacagttggcccttgagcatgagtcttacgagatgggtgaagcacgcttccgcaagatgtttgagcgtcaacttaaagctggtgaggttgcggataacgctgccgccaagcctctcatcactaccctactccctaagatgattgcacgcatcaacgactggtttgaggaagtgaaagctaagcgcggcaagcgcccgacagccttccagttcctgcaagaaatcaagccggaagccgtagcgtacatcaccattaagaccactctggcttgcctaaccagtgcggacaatacaaccgttcaggctgtagcaagcgcaatcggtcgggccattgaggacgaggctcgcttcggtcgtatccgtgaccttgaagctaagcacttcaagaagaacgttgaggaacaactcaacaagcgcgtagggcacgtctacaagaaagcatttatgcaagttgtcgagcacgacatgctctctaagggtctactcggtggcgaggcgtggtcttcgtggcataaggaagactctattcatgtaggagtacgctgcatcgagatgctcattgagtcaaccggaatggttagcttacaccgccaaaatgctggcgtagtgggtgcagactctgagactatcgaactcgcacctgaatacgctgaggctatcgcaacccgtgcaggtgcgctggctggcatctctccgatgttccaaccttgcgtagttcctcctaagccgtggactggcattactggtggtggctattgggctgcggggcgcaaacccctgcagttagtacgtactcgcagtctggcggcgcttcgccgctatgaagaagtgtcgatgccggaggtcatcaaagcagtcaacattgcgcagaatacagcatggcgtattaacaagaaagttctcgacgtagcgaataccatcacccaatggcagcactgtccagtcgcggatgtgcctgcgatggatcgtggcgaaatgccagctcgtccgttggacatcgataccaacgagattgcacttaaagcgtggaagaaagaagcttccgcgttctaccgcaaagacaaagcacgcatgagccgtcgtctgtcgatggagtttatgttatctcaggcgaacaagtttgcgaattatgaggcaatctggtttccgcaaaacatggattggcgtgggcgcgtgtacgctgtcccgatgttcaatcctcagggcaacgatatgacgaaaggcctgctgacctttgcgcaggagaaacccattggtgaagacggcttctattggctcaagattcatggcgcaaatacagctggagtggataaagtaccgtttccacaacgcatcaaatttgttgaggataaccatacgaatattatggaatgcgcgaaagcaccgctggaaaacacttggtgggcggaacaggactcgccgttctgctttctggcgttctgctttgagtatgctggcgtcatcaatagtggtctgtcgtacaactgtagcttgcctctggcatttgatggtagttgctccggcctgcaacatttctcagcgatgttacgcgacgaaattggcggcaaagctgtgaatctcctcccatctgcggaataccaggatatttatcgtatcgtcagcgacaaagttaacgagatgctgaaacaagatctgattaacggtacctctaccaccgtggaaacggtgactgataaaaagacaggcgaaattacccaacgcacgaaatacgggaccaaagttatggcacagtggtggttagaacacggtgtgaatcgtggcgtcacgaaacgcccggttatgactttggtgtatgggagcaaagagtttggatggcgcgatcaagtgctgagtgacaccattcaaccggcgatcgataacggcaagggtgacatgtttctgaatccgaatcaggctgctggttacatggcgaaactgatctggaacgcagtgtccgggaccgtagtcgcagcagttgaggcgatgaactggctgaaaagtgcggcgaaattacttgctgctgaagtgaaggatgagaagacggatacagttctgcgtggccgctgcgcagtacattgggtgactcccgacggcttccctgtgtggcaggaatacaagaagcctattcaaacgcgcttgaacctgatgttcctcggtcagttccgcttacagcctaccattaacaccaacaaagatagcgagattgatgcacgcaaacaggtgtctggtatcgctcctaactttgtacacagcctggacggtaaccaccttcgtatgactgtagtgtgggcacacgagaagtacggaatcgaatcttttgcactgattcacgactccttcggtaccattccggctgacgctgcgaacctgttcaaagcagtgcgcgaaactttcgttgacacatatgagtcttgtgatgtactggctgatttctacgaccagattgctgaccagttgcacgagtctcaacgcgacaaaatgccagcacttccggctaaaggtaagttgaacctccgtgacatcttaaaatcggacttcgcgttcgcg

SEQ ID NO: 1680 - protein, 890 aa, synthetic construct
  REGION 1..890: note = Variant of RNA polymerase
MHHHHHHMNTINIAKNDFSDIELAAIPFNTLADHYGERLAREQLALEHESYEMGEARFRKMFERQLKAGEVADNAAAKPLITTLLPKMIARINDWFEEVKAKRGKRPTAFQFLQEIKPEAVAYITIKTTLACLTSADNTTVQAVASAIGRAIEDEARFGRIRDLEAKHFKKNVEEQLNKRVGHVYKKAFMQVVEHDMLSKGLLGGEAWSSWHKEDSIHVGVRCIEMLIESTGMVSLHRQNAGVVGADSETIELAPEYAEAIATRAGALAGISPMFQPCVVPPKPWTGITGGGYWAAGRKPLQLVRTRSLAALRRYEEVSMPEVIKAVNIAQNTAWRINKKVLDVANTITQWQHCPVADVPAMDRGEMPARPLDIDTNEIALKAWKKEASAFYRKDKARMSRRLSMEFMLSQANKFANYEAIWFPQNMDWRGRVYAVPMFNPQGNDMTKGLLTFAQEKPIGEDGFYWLKIHGANTAGVDKVPFPQRIKFVEDNHTNIMECAKAPLENTWWAEQDSPFCFLAFCFEYAGVINSGLSYNCSLPLAFDGSCSGLQHFSAMLRDEIGGKAVNLLPSAEYQDIYRIVSDKVNEMLKQDLINGTSTTVETVTDKKTGEITQRTKYGTKVMAQWWLEHGVNRGVTKRPVMTLVYGSKEFGWRDQVLSDTIQPAIDNGKGDMFLNPNQAAGYMAKLIWNAVSGTVVAAVEAMNWLKSAAKLLAAEVKDEKTDTVLRGRCAVHWVTPDGFPVWQEYKKPIQTRLNLMFLGQFRLQPTINTNKDSEIDARKQVSGIAPNFVHSLDGNHLRMTVVWAHEKYGIESFALIHDSFGTIPADAANLFKAVRETFVDTYESCDVLADFYDQIADQLHESQRDKMPALPAKGKLNLRDILKSDFAFA

SEQ ID NO: 1681 - DNA, 2670 bp, synthetic construct
  misc_feature 1..2670: note = Variant of RNA polymerase
  source 1..2670: mol_type = other DNA
atgcaccatcaccatcaccatatgaacacgattaacattgctaagaacgacttctctgacatcgaactggctgctatcccgttcaacactctggctgaccattacggtgagcgtttagctcgcgaacagttggcccttgagcatgagtcttacgagatgggtgaagcacgcttccgcaagatgtttgagcgtcaacttaaagctggtgaggttgcggataacgctgccgccaagcctctcatcactaccctactccctaagatgattgcacgcatcaacgactggtttgaggaagtgaaagctaagcgcggcaagcgcccgacagccttccagttcctgcaagaaatcaagccggaagccgtagcgtacatcaccattaagaccactctggcttgcctaaccagtgcggacaatacaaccgttcaggctgtagcaagcgcaatcggtcgggccattgaggacgaggctcgcttcggtcgtatccgtgaccttgaagctaagcacttcaagaagaacgttgaggaacaactcaacaagcgcgtagggcacgtctacaagaaagcatttatgcaagttgtcgagcacgacatgctctctaagggtctactcggtggcgaggcgtggtcttcgtggcataaggaagactctattcatgtaggagtacgctgcatcgagatgctcattgagtcaaccggaatggttagcttacaccgccaaaatgctggcgtagtgggtgcagactctgagactatcgaactcgcacctgaatacgctgaggctatcgcaacccgtgcaggtgcgctggctggcatctctccgatgttccaaccttgcgtagttcctcctaagccgtggactggcattactggtggtggctattgggctgcggggcgcaaacccctgcagttagtacgtactgggagtctggcggcgcttcgccgctatgaagaagtgtcgatgccggaggtcatcaaagcagtcaacattgcgcagaatacagcatggcgtattaacaagaaagttctcgacgtagcgaataccatcacccaatggcagcactgtccagtcgcggatgtgcctgcgatggatcgtggcgaaatgccagctcgtccgttggacatcgataccaacgagattgcacttaaagcgtggaagaaagaagcttccgcgttctaccgcaaagacaaagcacgcatgagccgtcgtctgtcgatggagtttatgttatctcaggcgaacaagtttgcgaattatgaggcaatctggtttccgcaaaacatggattggcgtgggcgcgtgtacgctgtcccgatgttcaatcctcagggcaacgatatgacgaaaggcctgctgacctttgcgcaggagaaacccattggtgaagacggcttctattggctcaagattcatggcgcaaatacagctggagtggataaagtaccgtttccacaacgcatcaaatttgttgaggataaccatacgaatattatggaatgcgcgaaagcaccgctggaaaacacttggtgggcggaacaggactcgccgttctgctttctggcgttctgctttgagtatgctggcgtcatcaatagtggtctgtcgtacaactgtagcttgcctctggcatttgatggtagttgctccggcctgcaacatttctcagcgatgttacgcgacgaaattggcggcaaagctgtgaatctcctcccatctgcggaataccaggatatttatcgtatcgtcagcgacaaagttaacgagatgctgaaacaagatctgattaacggtacctctaccaccgtggaaacggtgactgataaaaagacaggcgaaattacccaacgcacgaaatacgggaccaaagttatggcacagtggtggttagaacacggtgtgaatcgtggcgtcacgaaacgcccggttatgactttggtgtatgggagcaaagagtttggattccgcgatcaagtgctgagtgacaccattcaaccggcgatcgataacggcaagggtgacatgtttctgaatccgaatcaggctgctggttacatggcgaaactgatctggaacgcagtgtccgggaccgtagtcgcagcagttgaggcgatgaactggctgaaaagtgcggcgaaattacttgctgctgaagtgaaggatgagaagacggatacagttctgcgtggccgctgcgcagtacattgggtgactcccgacggcttccctgtgtggcaggaatacaagaagcctattcaaacgcgcttgaacctgatgttcctcggtcagttccgcttacagcctaccattaacaccaacaaagatagcgagattgatgcacgcaaacaggtgtctggtatcgctcctaactttgtacacagcctggacggtaaccaccttcgtatgactgtagtgtgggcacacgagaagtacggaatcgaatcttttgcactgattcacgactccttcggtaccattccggctgacgctgcgaacctgttcaaagcagtgcgcgaaactttcgttgacacatatgagtcttgtgatgtactggctgatttctacgaccagattgctgaccagttgcacgagtctcaacgcgacaaaatgccagcacttccggctaaaggtaagttgaacctccgtgacatcttaaaatcggacttcgcgttcgcg

SEQ ID NO: 1682 - protein, 890 aa, synthetic construct
  REGION 1..890: note = Variant of RNA polymerase
MHHHHHHMNTINIAKNDFSDIELAAIPFNTLADHYGERLAREQLALEHESYEMGEARFRKMFERQLKAGEVADNAAAKPLITTLLPKMIARINDWFEEVKAKRGKRPTAFQFLQEIKPEAVAYITIKTTLACLTSADNTTVQAVASAIGRAIEDEARFGRIRDLEAKHFKKNVEEQLNKRVGHVYKKAFMQVVEHDMLSKGLLGGEAWSSWHKEDSIHVGVRCIEMLIESTGMVSLHRQNAGVVGADSETIELAPEYAEAIATRAGALAGISPMFQPCVVPPKPWTGITGGGYWAAGRKPLQLVRTGSLAALRRYEEVSMPEVIKAVNIAQNTAWRINKKVLDVANTITQWQHCPVADVPAMDRGEMPARPLDIDTNEIALKAWKKEASAFYRKDKARMSRRLSMEFMLSQANKFANYEAIWFPQNMDWRGRVYAVPMFNPQGNDMTKGLLTFAQEKPIGEDGFYWLKIHGANTAGVDKVPFPQRIKFVEDNHTNIMECAKAPLENTWWAEQDSPFCFLAFCFEYAGVINSGLSYNCSLPLAFDGSCSGLQHFSAMLRDEIGGKAVNLLPSAEYQDIYRIVSDKVNEMLKQDLINGTSTTVETVTDKKTGEITQRTKYGTKVMAQWWLEHGVNRGVTKRPVMTLVYGSKEFGFRDQVLSDTIQPAIDNGKGDMFLNPNQAAGYMAKLIWNAVSGTVVAAVEAMNWLKSAAKLLAAEVKDEKTDTVLRGRCAVHWVTPDGFPVWQEYKKPIQTRLNLMFLGQFRLQPTINTNKDSEIDARKQVSGIAPNFVHSLDGNHLRMTVVWAHEKYGIESFALIHDSFGTIPADAANLFKAVRETFVDTYESCDVLADFYDQIADQLHESQRDKMPALPAKGKLNLRDILKSDFAFA

SEQ ID NO: 1683 - DNA, 2670 bp, synthetic construct
  misc_feature 1..2670: note = Variant of RNA polymerase
  source 1..2670: mol_type = other DNA
atgcaccatcaccatcaccatatgaacacgattaacattgctaagaacgacttctctgacatcgaactggctgctatcccgttcaacactctggctgaccattacggtgagcgtttagctcgcgaacagttggcccttgagcatgagtcttacgagatgggtgaagcacgcttccgcaagatgtttgagcgtcaacttaaagctggtgaggttgcggataacgctgccgccaagcctctcatcactaccctactccctaagatgattgcacgcatcaacgactggtttgaggaagtgaaagctaagcgcggcaagcgcccgacagccttccagttcctgcaagaaatcaagccggaagccgtagcgtacatcaccattaagaccactctggcttgcctaaccagtgcggacaatacaaccgttcaggctgtagcaagcgcaatcggtcgggccattgaggacgaggctcgcttcggtcgtatccgtgaccttgaagctaagcacttcaagaagaacgttgaggaacaactcaacaagcgcgtagggcacgtctacaagaaagcatttatgcaagttgtcgagcacgacatgctctctaagggtctactcggtggcgaggcgtggtcttcgtggcataaggaagactctattcatgtaggagtacgctgcatcgagatgctcattgagtcaaccggaatggttagcttacaccgccaaaatgctggcgtagtgggtgcagactctgagactatcgaactcgcacctgaatacgctgaggctatcgcaacccgtgcaggtgcgctggctggcatctctccgatgttccaaccttgcgtagttcctcctaagccgtggactggcattactggtggtggctattgggctgcggggcgcaaacccctgcagttagtacgtactcgcagtctgaaggcgcttcgccgctatgaagaagtgtcgatgccggaggtcatcaaagcagtcaacattgcgcagaatacagcatggcgtattaacaagaaagttctcgacgtagcgaataccatcacccaatggaagcactgtccagtcgcggatgttcctgcgatggatcgtggcgaaatgccagctaagccgttggacatcgataccaacgagattgcacttaaagcgtggaagaaagaggcttcggcgttctaccgccgcgacaaagcacgcatgagccgtcgtctgtcgatggagtttatgttatctcaggcgaacaagtttgcgaattatgaggcaatctggtttccgcaaaacatggattggcgtgggcgcgtgtacgctgtcccgatgttcaatcctcagggcaacgatatgacgaaaggcctgctgacctttgcgcaggagaaacccattggtgaagacggcttctattggctcaagattcatggcgcaaatacagctggagtggataaagtaccgtttccacaacgcatcaaatttgttgaggataaccatacgaatattatggaatgcgcgaaagcaccgctggaaaacacttggtgggcggaacaggactcgccgttctgctttctggcgttctgctttgagtatgctggcgtcatcaatagtggtctgtcgtacaactgtagcttgcctctggcatttgatggtagttgctccggcctgcaacatttctcagcgatgttacgcgacgaaattggcggcaaagctgtgaatctcctcccatctgcggaataccaggatatttatcgtatcgtcagcgacaaagttaacgagatgctgaaacaagatctgattaacggtacctctaccaccgtggaaacggtgactgataaaaagacaggcgaaattacccaacgcacgaaatacgggaccaaagttatggcagggtggtggttagaacacggtgtgaaccgtggcgtcacgaaacgcccggttatgactttggtgtatgggagcaaagagtttggattccgcgatcaagtgctgagtgacaccattcaaccggcgatcgataacggcaagggtgacatgtttctgaatccgaatcaggctgctggttacatggcgaaactgatctggaacgcagtgtccgggaccgtagtcgcagcagttgaggcgatgaactggctgaaaagtgcggcgaaattacttgctgctgaagtgaaggatgagaagacggatacaattctgcgtggccgctgcgcagtacattgggtgactcccgacggcttccctgtgtggcaggaatacaagaagcctattcaaacgcgcttgaacctgatgttcctcggtcagttccgcttacagcctaccattaacaccaacaaagatagcgagattgatgcacgcaaacaggtgtctggtatcgctcctaactttgtacacagcctggacggtaaccaccttcgtatgactgtagtgtgggcacacgagaagtacggaatcgaatcttttgcactgattcacgactccttcggtaccattccggctgacgctgcgaacctgttcaaagcagtgcgcgaaactttcgttgacacatatgagtcttgtgatgtactggctgatttctacgaccagattgctgaccagttgcacgagtctcaacgcgacaaaatgccagcacttccggctaaaggtaagttgaacctccgtgacatcttaaaatcggacttcgcgttcgcg

SEQ ID NO: 1684 - protein, 890 aa, synthetic construct
  REGION 1..890: note = Variant of RNA polymerase
MHHHHHHMNTINIAKNDFSDIELAAIPFNTLADHYGERLAREQLALEHESYEMGEARFRKMFERQLKAGEVADNAAAKPLITTLLPKMIARINDWFEEVKAKRGKRPTAFQFLQEIKPEAVAYITIKTTLACLTSADNTTVQAVASAIGRAIEDEARFGRIRDLEAKHFKKNVEEQLNKRVGHVYKKAFMQVVEHDMLSKGLLGGEAWSSWHKEDSIHVGVRCIEMLIESTGMVSLHRQNAGVVGADSETIELAPEYAEAIATRAGALAGISPMFQPCVVPPKPWTGITGGGYWAAGRKPLQLVRTRSLKALRRYEEVSMPEVIKAVNIAQNTAWRINKKVLDVANTITQWKHCPVADVPAMDRGEMPAKPLDIDTNEIALKAWKKEASAFYRRDKARMSRRLSMEFMLSQANKFANYEAIWFPQNMDWRGRVYAVPMFNPQGNDMTKGLLTFAQEKPIGEDGFYWLKIHGANTAGVDKVPFPQRIKFVEDNHTNIMECAKAPLENTWWAEQDSPFCFLAFCFEYAGVINSGLSYNCSLPLAFDGSCSGLQHFSAMLRDEIGGKAVNLLPSAEYQDIYRIVSDKVNEMLKQDLINGTSTTVETVTDKKTGEITQRTKYGTKVMAGWWLEHGVNRGVTKRPVMTLVYGSKEFGFRDQVLSDTIQPAIDNGKGDMFLNPNQAAGYMAKLIWNAVSGTVVAAVEAMNWLKSAAKLLAAEVKDEKTDTILRGRCAVHWVTPDGFPVWQEYKKPIQTRLNLMFLGQFRLQPTINTNKDSEIDARKQVSGIAPNFVHSLDGNHLRMTVVWAHEKYGIESFALIHDSFGTIPADAANLFKAVRETFVDTYESCDVLADFYDQIADQLHESQRDKMPALPAKGKLNLRDILKSDFAFA

SEQ ID NO: 1685 - DNA, 2670 bp, synthetic construct
  misc_feature 1..2670: note = Variant of RNA polymerase
  source 1..2670: mol_type = other DNA
atgcaccatcaccatcaccatatgaacacgattaacattgctaagaacgacttctctgacatcgaactggctgctatcccgttcaacactctggctgaccattacggtgagcgtttagctcgcgaacagttggcccttgagcatgagtcttacgagatgggtgaagcacgcttccgcaagatgtttgagcgtcaacttaaagctggtgaggttgcggataacgctgccgccaagcctctcatcactaccctactccctaagatgattgcacgcatcaacgactggtttgaggaagtgaaagctaagcgcggcaagcgcccgacagccttccagttcctgcaagaaatcaagccggaagccgtagcgtacatcaccattaagaccactctggcttgcctaaccagtgcggacaatacaaccgttcaggctgtagcaagcgcaatcggtcgggccattgaggacgaggctcgcttcggtcgtatccgtgaccttgaagctaagcacttcaagaagaacgttgaggaacaactcaacaagcgcgtagggcacgtctacaagaaagcatttatgcaagttgtcgagcacgacatgctctctaagggtctactcggtggcgaggcgtggtcttcgtggcataaggaagactctattcatgtaggagtacgctgcatcgagatgctcattgagtcaaccggaatggttagcttacaccgccaaaatgctggcgtagtgggtgcagactctgagactatcgaactcgcacctgaatacgctgaggctatcgcaacccgtgcaggtgcgctggctggcatctctccgatgttccaaccttgcgtagttcctcctaagccgtggactggcattactggtggtggctattgggctgcggggcgcaaacccctgcagttagtacgtactcgcagtaaggcggcgcttcgccgctatgaagaagtgtcgatgccggaggtcatcaaagcagtcaacattgcgcagaatacagcatggcgtattaacaagaaagttctcgacgtagcgaataccatcacccaatggcagcactgtccagtcgcggatgtgcctgcgatggatcgtggcgaaatgccagctcgtccgttggacatcgataccaacgagattgcacttaaagcgtggaagaaagaagcttccgcgttctaccgcaaagacaaagcacgcatgagccgtcgtctgtcgatggagtttatgttatctcaggcgaacaagtttgcgaattatgaggcaatctggtttccgcaaaacatggattggcgtgggcgcgtgtacgctgtcccgatgttcaatcctcagggcaacgatatgacgaaaggcctgctgacctttgcgcaggagaaacccattggtgaagacggcttctattggctcaagattcatggcgcaaatacagctggagtggataaagtaccgtttccacaacgcatcaaatttgttgaggataaccatacgaatattatggaatgcgcgaaagcaccgctggaaaacacttggtgggcggaacaggactcgccgttctgctttctggcgttctgctttgagtatgctggcgtcatcaatagtggtctgtcgtacaactgtagcttgcctctggcatttgatggtagttgctccggcctgcaacatttctcagcgatgttacgcgacgaaattggcggcaaagctgtgaatctcctcccatctgcggaataccaggatatttatcgtatcgtcagcgacaaagttaacgagatgctgaaacaagatctgattaacggtacctctaccaccgtggaaacggtgactgataaaaagacaggcgaaattacccaacgcacgaaatacgggaccaaagttatggcacagtggtggttagaacacggtgtgaatcgtggcgtcacgaaacgcccggttatgactttggtgtatgggagcaaagagtttggattccgcgatcaagtgctgagtgacaccattcaaccggcgatcgataacggcaagggtgacatgtttctgaatccgaatcaggctgctggttacatggcgaaactgatctggaacgcagtgtccgggaccgtagtcgcagcagttgaggcgatgaactggctgaaaagtgcggcgaaattacttgctgctgaagtgaaggatgagaagacggatacagttctgcgtggccgctgcgcagtacattgggtgactcccgacggcttccctgtgtggcaggaatacaagaagcctattcaaacgcgcttgaacctgatgttcctcggtcagttccgcttacagcctaccattaacaccaacaaagatagcgagattgatgcacgcaaacaggtgtctggtatcgctcctaactttgtacacagcctggacggtaaccaccttcgtatgactgtagtgtgggcacacgagaagtacggaatcgaatcttttgcactgattcacgactccttcggtaccattccggctgacgctgcgaacctgttcaaagcagtgcgcgaaactttcgttgacacatatgagtcttgtgatgtactggctgatttctacgaccagattgctgaccagttgcacgagtctcaacgcgacaaaatgccagcacttccggctaaaggtaagttgaacctccgtgacatcttaaaatcggacttcgcgttcgcg

SEQ ID NO: 1686 - protein, 890 aa, synthetic construct
  REGION 1..890: note = Variant of RNA polymerase
MHHHHHHMNTINIAKNDFSDIELAAIPFNTLADHYGERLAREQLALEHESYEMGEARFRKMFERQLKAGEVADNAAAKPLITTLLPKMIARINDWFEEVKAKRGKRPTAFQFLQEIKPEAVAYITIKTTLACLTSADNTTVQAVASAIGRAIEDEARFGRIRDLEAKHFKKNVEEQLNKRVGHVYKKAFMQVVEHDMLSKGLLGGEAWSSWHKEDSIHVGVRCIEMLIESTGMVSLHRQNAGVVGADSETIELAPEYAEAIATRAGALAGISPMFQPCVVPPKPWTGITGGGYWAAGRKPLQLVRTRSKAALRRYEEVSMPEVIKAVNIAQNTAWRINKKVLDVANTITQWQHCPVADVPAMDRGEMPARPLDIDTNEIALKAWKKEASAFYRKDKARMSRRLSMEFMLSQANKFANYEAIWFPQNMDWRGRVYAVPMFNPQGNDMTKGLLTFAQEKPIGEDGFYWLKIHGANTAGVDKVPFPQRIKFVEDNHTNIMECAKAPLENTWWAEQDSPFCFLAFCFEYAGVINSGLSYNCSLPLAFDGSCSGLQHFSAMLRDEIGGKAVNLLPSAEYQDIYRIVSDKVNEMLKQDLINGTSTTVETVTDKKTGEITQRTKYGTKVMAQWWLEHGVNRGVTKRPVMTLVYGSKEFGFRDQVLSDTIQPAIDNGKGDMFLNPNQAAGYMAKLIWNAVSGTVVAAVEAMNWLKSAAKLLAAEVKDEKTDTVLRGRCAVHWVTPDGFPVWQEYKKPIQTRLNLMFLGQFRLQPTINTNKDSEIDARKQVSGIAPNFVHSLDGNHLRMTVVWAHEKYGIESFALIHDSFGTIPADAANLFKAVRETFVDTYESCDVLADFYDQIADQLHESQRDKMPALPAKGKLNLRDILKSDFAFA

SEQ ID NO: 1687 - DNA, 2670 bp, synthetic construct
  misc_feature 1..2670: note = Variant of RNA polymerase
  source 1..2670: mol_type = other DNA
atgcaccatcaccatcaccatatgaacacgattaacattgctaagaacgacttctctgacatcgaactggctgctatcccgttcaacactctggctgaccattacggtgagcgtttagctcgcgaacagttggcccttgagcatgagtcttacgagatgggtgaagcacgcttccgcaagatgtttgagcgtcaacttaaagctggtgaggttgcggataacgctgccgccaagcctctcatcactaccctactccctaagatgattgcacgcatcaacgactggtttgaggaagtgaaagctaagcgcggcaagcgcccgacagccttccagttcctgcaagaaatcaagccggaagccgtagcgtacatcaccattaagaccactctggcttgcctaaccagtgcggacaatacaaccgttcaggctgtagcaagcgcaatcggtcgggccattgaggacgaggctcgcttcggtcgtatccgtgaccttgaagctaagcacttcaagaagaacgttgaggaacaactcaacaagcgcgtagggcacgtctacaagaaagcatttatgcaagttgtcgagcacgacatgctctctaagggtctactcggtggcgaggcgtggtcttcgtggcataaggaagactctattcatgtaggagtacgctgcatcgagatgctcattgagtcaaccggaatggttagcttacaccgccaaaatgctggcgtagtgggtgcagactctgagactatcgaactcgcacctgaatacgctgaggctatcgcaacccgtgcaggtgcgctggctggcatctctccgatgttccaaccttgcgtagttcctcctaagccgtggactggcattactggtggtggctattgggctgcggggcgcaaacccctgcagttagtacgtactcgcagtctggcggcgcttcgccgctatgaagaagtgtcgatgccggaggtcatcaaagcagtcaacattgcgcagaatacagcatggcgtattaacaagaaagttctcgacgtagcgaataccatcacccaatggcagcactgtccagtcgcggatgtgcctgcgatggatcgtggcgaaatgccagctcgtccgttggacatcgataccaacgagattgcacttaaagcgtggaagaaagaagcttccgcgttctaccgcaaagacaaagcacgcatgagccgtcgtctgtcgatggagtttatgttatctcaggcgaacaagtttgcgaattatgaggcaatctggtttccgcaaaacatggattggcgtgggcgcgtgtacgctgtcccgatgttcaatcctcagggcaacgatatgacgaaaggcctgctgacctttgcgcaggagaaacccattggtgaagacggcttctattggctcaagattcatggcgcaaatacagctggagtggataaagtaccgtttccacaacgcatcaaatttgttgaggataaccatacgaatattatggaatgcgcgaaagcaccgctggaaaacacttggtgggcggaacaggactcgccgttctgctttctggcgttctgctttgagtatgctggcgtcatcaatagtggtctgtcgtacaactgtagcttgcctctggcatttgatggtagttgctccggcctgcaacatttctcagcgatgttacgcgacgaaattggcggcaaagctgtgaatctcctcccatctgcggaataccaggatatttatcgtatcgtcagcgacaaagttaacgagatgctgaaacaagatctgattaacggtacctctaccaccgtggaaacggtgactgataaaaagacaggcgaaattacccaacgcacgaaatacgggaccaaagttatggcacagtggtggttagaacacggtgtgaatcgtggcgtcacgaaacgcccggttatgactttggtgtatgggagcaaagagtttggattccgcgatcaagtgctgagtgacaccattcttccggcgatcgataacggcaagggtgacatgtttctgaatccgaatcaggctgctggttacatggcgaaactgatctggaacgcagtgtccgggaccgtagtcgcagcagttgaggcgatgaactggctgaaaagtgcggcgaaattacttgctgctgaagtgaaggatgagaagacggatacagttctgcgtggccgctgcgcagtacattgggtgactcccgacggcttccctgtgtggcaggaatacaagaagcctattcaaacgcgcttgaacctgatgttcctcggtcagttccgcttacagcctaccattaacaccaacaaagatagcgagattgatgcacgcaaacaggtgtctggtatcgctcctaactttgtacacagcctggacggtaaccaccttcgtatgactgtagtgtgggcacacgagaagtacggaatcgaatcttttgcactgattcacgactccttcggtaccattccggctgacgctgcgaacctgttcaaagcagtgcgcgaaactttcgttgacacatatgagtcttgtgatgtactggctgatttctacgaccagattgctgaccagttgcacgagtctcaacgcgacaaaatgccagcacttccggctaaaggtaagttgaacctccgtgacatcttaaaatcggacttcgcgttcgcg

SEQ ID NO: 1688 - protein, 890 aa, synthetic construct
  REGION 1..890: note = Variant of RNA polymerase
MHHHHHHMNTINIAKNDFSDIELAAIPFNTLADHYGERLAREQLALEHESYEMGEARFRKMFERQLKAGEVADNAAAKPLITTLLPKMIARINDWFEEVKAKRGKRPTAFQFLQEIKPEAVAYITIKTTLACLTSADNTTVQAVASAIGRAIEDEARFGRIRDLEAKHFKKNVEEQLNKRVGHVYKKAFMQVVEHDMLSKGLLGGEAWSSWHKEDSIHVGVRCIEMLIESTGMVSLHRQNAGVVGADSETIELAPEYAEAIATRAGALAGISPMFQPCVVPPKPWTGITGGGYWAAGRKPLQLVRTRSLAALRRYEEVSMPEVIKAVNIAQNTAWRINKKVLDVANTITQWQHCPVADVPAMDRGEMPARPLDIDTNEIALKAWKKEASAFYRKDKARMSRRLSMEFMLSQANKFANYEAIWFPQNMDWRGRVYAVPMFNPQGNDMTKGLLTFAQEKPIGEDGFYWLKIHGANTAGVDKVPFPQRIKFVEDNHTNIMECAKAPLENTWWAEQDSPFCFLAFCFEYAGVINSGLSYNCSLPLAFDGSCSGLQHFSAMLRDEIGGKAVNLLPSAEYQDIYRIVSDKVNEMLKQDLINGTSTTVETVTDKKTGEITQRTKYGTKVMAQWWLEHGVNRGVTKRPVMTLVYGSKEFGFRDQVLSDTILPAIDNGKGDMFLNPNQAAGYMAKLIWNAVSGTVVAAVEAMNWLKSAAKLLAAEVKDEKTDTVLRGRCAVHWVTPDGFPVWQEYKKPIQTRLNLMFLGQFRLQPTINTNKDSEIDARKQVSGIAPNFVHSLDGNHLRMTVVWAHEKYGIESFALIHDSFGTIPADAANLFKAVRETFVDTYESCDVLADFYDQIADQLHESQRDKMPALPAKGKLNLRDILKSDFAFA

SEQ ID NO: 1689 - DNA, 2670 bp, synthetic construct
  misc_feature 1..2670: note = Variant of RNA polymerase
  source 1..2670: mol_type = other DNA
atgcaccatcaccatcaccatatgaacacgattaacattgctaagaacgacttctctgacatcgaactggctgctatcccgttcaacactctggctgaccattacggtgagcgtttagctcgcgaacagttggcccttgagcatgagtcttacgagatgggtgaagcacgcttccgcaagatgtttgagcgtcaacttaaagctggtgaggttgcggataacgctgccgccaagcctctcatcactaccctactccctaagatgattgcacgcatcaacgactggtttgaggaagtgaaagctaagcgcggcaagcgcccgacagccttccagttcctgcaagaaatcaagccggaagccgtagcgtacatcaccattaagaccactctggcttgcctaaccagtgcggacaatacaaccgttcaggctgtagcaagcgcaatcggtcgggccattgaggacgaggctcgcttcggtcgtatccgtgaccttgaagctaagcacttcaagaagaacgttgaggaacaactcaacaagcgcgtagggcacgtctacaagaaagcatttatgcaagttgtcgagcacgacatgctctctaagggtctactcggtggcgaggcgtggtcttcgtggcataaggaagactctattcatgtaggagtacgctgcatcgagatgctcattgagtcaaccggaatggttagcttacaccgccaaaatgctggcgtagtgggtgcagactctgagactatcgaactcgcacctgaatacgctgaggctatcgcaacccgtgcaggtgcgctggctggcatctctccgatgttccaaccttgcgtagttcctcctaagccgtggactggcattactggtggtggctattgggctgcggggcgcaaacccctgcagttagtacgtactcgcagtctgaaggcgcttcgccgctatgaagaagtgtcgatgccggaggtcatcaaagcagtcaacattgcgcagaatacagcatggcgtattaacaagaaagttctcgacgtagcgaataccatcacccaatggcagcactgtccagtcgcggatgtgcctgcgatggatcgtggcgaaatgccagctaagccgttggacatcgataccaacgagattgcacttaaagcgtggaagaaagaggcttcggcgttctaccgcaaagacaaagcacgcatgagccgtcgtctgtcgatggagtttatgttatctcaggcgaacaagtttgcgaattatgaggcaatctggtttccgcaaaacatggattggcgtgggcgcgtgtacgctgtcccgatgttcaatcctcagggcaacgatatgacgaaaggcctgctgacctttgcgcaggagaaacccattggtgaagacggcttctattggctcaagattcatggcgcaaatacagctggagtggataaagtaccgtttccacaacgcatcaaatttgttgaggataaccatacgaatattatggaatgcgcgaaagcaccgctggaaaacacttggtgggcggaacaggactcgccgttctgctttctggcgttctgctttgagtatgctggcgtcatcaatagtggtctgtcgtacaactgtagcttgcctctggcatttgatggtagttgctccggcctgcaacatttctcagcgatgttacgcgacgaaattggcggcaaagctgtgaatctcctcccatctgcggaataccaggatatttatcgtatcgtcagcgacaaagttaacgagatgctgaaacaagatctgattaacggtacctctaccaccgtggaaacggtgactgataaaaagacaggcgaaattacccaacgcacgaaatacgggaccaaagttatggcagggtggtggttagaacacggtgtgaatcgtggcgtcacgaaacgcccggttatgactttggtgtatgggagcaaagagtttggattccgcgatcaagtgctgagtgacaccattcaaccggcgatcgataacggcaagggtgacatgtttctgaatccgaatcaggctgctggttacatggcgaaactgatctggaacgcggtgtccgggaccgtagtcgcagcagttgaggcgatgaactggctgaaaagtgcggcgaaattacttgctgctgaagtgaaggatgagaagacggatacagttctgcgtggccgctgcgcagtacattgggtgactcccgacggcttccctgtgtggcaggaatacaagaagcctattcaaacgcgcttgaacctgatgttcctcggtcagttccgcttacagcctaccattaacaccaacaaagatagcgagattgatgcacgcaaacaggtgtctggtatcgctcctaactttgtacacagcctggacggtaaccaccttcgtatgactgtagtgtgggcacacgagaagtacggaatcgaatcttttgcactgattcacgactccttcggtaccattccggctgacgctgcgaacctgttcaaagcagtgcgcgaaactttcgttgacacatatgagtcttgtgatgtactggctgatttctacgaccagattgctgaccagttgcacgagtctcaacgcgacaaaatgccagcacttccggctaaaggtaagttgaacctccgtgacatcttaaaatcggacttcgcgttcgcg

SEQ ID NO: 1690 - protein, 890 aa, synthetic construct
  REGION 1..890: note = Variant of RNA polymerase
MHHHHHHMNTINIAKNDFSDIELAAIPFNTLADHYGERLAREQLALEHESYEMGEARFRKMFERQLKAGEVADNAAAKPLITTLLPKMIARINDWFEEVKAKRGKRPTAFQFLQEIKPEAVAYITIKTTLACLTSADNTTVQAVASAIGRAIEDEARFGRIRDLEAKHFKKNVEEQLNKRVGHVYKKAFMQVVEHDMLSKGLLGGEAWSSWHKEDSIHVGVRCIEMLIESTGMVSLHRQNAGVVGADSETIELAPEYAEAIATRAGALAGISPMFQPCVVPPKPWTGITGGGYWAAGRKPLQLVRTRSLKALRRYEEVSMPEVIKAVNIAQNTAWRINKKVLDVANTITQWQHCPVADVPAMDRGEMPAKPLDIDTNEIALKAWKKEASAFYRKDKARMSRRLSMEFMLSQANKFANYEAIWFPQNMDWRGRVYAVPMFNPQGNDMTKGLLTFAQEKPIGEDGFYWLKIHGANTAGVDKVPFPQRIKFVEDNHTNIMECAKAPLENTWWAEQDSPFCFLAFCFEYAGVINSGLSYNCSLPLAFDGSCSGLQHFSAMLRDEIGGKAVNLLPSAEYQDIYRIVSDKVNEMLKQDLINGTSTTVETVTDKKTGEITQRTKYGTKVMAGWWLEHGVNRGVTKRPVMTLVYGSKEFGFRDQVLSDTIQPAIDNGKGDMFLNPNQAAGYMAKLIWNAVSGTVVAAVEAMNWLKSAAKLLAAEVKDEKTDTVLRGRCAVHWVTPDGFPVWQEYKKPIQTRLNLMFLGQFRLQPTINTNKDSEIDARKQVSGIAPNFVHSLDGNHLRMTVVWAHEKYGIESFALIHDSFGTIPADAANLFKAVRETFVDTYESCDVLADFYDQIADQLHESQRDKMPALPAKGKLNLRDILKSDFAFA

SEQ ID NO: 1691 - DNA, 2670 bp, synthetic construct
  misc_feature 1..2670: note = Variant of RNA polymerase
  source 1..2670: mol_type = other DNA
atgcaccatcaccatcaccatatgaacacgattaacattgctaagaacgacttctctgacatcgaactggctgctatcccgttcaacactctggctgaccattacggtgagcgtttagctcgcgaacagttggcccttgagcatgagtcttacgagatgggtgaagcacgcttccgcaagatgtttgagcgtcaacttaaagctggtgaggttgcggataacgctgccgccaagcctctcatcactaccctactccctaagatgattgcacgcatcaacgactggtttgaggaagtgaaagctaagcgcggcaagcgcccgacagccttccagttcctgcaagaaatcaagccggaagccgtagcgtacatcaccattaagaccactctggcttgcctaaccagtgcggacaatacaaccgttcaggctgtagcaagcgcaatcggtcgggccattgaggacgaggctcgcttcggtcgtatccgtgaccttgaagctaagcacttcaagaagaacgttgaggaacaactcaacaagcgcgtagggcacgtctacaagaaagcatttatgcaagttgtcgagcacgacatgctctctaagggtctactcggtggcgaggcgtggtcttcgtggcataaggaagactctattcatgtaggagtacgctgcatcgagatgctcattgagtcaaccggaatggttagcttacaccgccaaaatgctggcgtagtgggtgcagactctgagactatcgaactcgcacctgaatacgctgaggctatcgcaacccgtgcaggtgcgctggctggcatctctccgatgttccaaccttgcgtagttcctcctaagccgtggactggcattactggtggtggctattgggctgcggggcgcaaacccctgcagttagtacgtactcgcagtctggcggcgcttcgccgctatgaagaagtgtcgatgccggaggtcatcaaagcagtcaacattgcgcagaatacagcatggcgtattaacaagaaagttctcgacgtagcgaataccatcacccaatggaagcactgtccagtcgcggatgtgcctgcgatggatcgtggcgaaatgccagctcgcccgttggacatcgataccaacgagattgcacttaaagcgtggaagaaagaagcttccgcgttctaccgccgcgacaaagcacgcatgagccgtcgtctgtcgatggagtttatgttatctcaggcgaacaagtttgcgaattatgaggcaatctggtttccgcaaaacatggattggcgtgggcgcgtgtacgctgtcccgatgttcaatcctcagggcaacgatatgacgaaaggcctgctgacctttgcgcaggagaaacccattggtgaagacggcttctattggctcaagattcatggcgcaaatacagctggagtggataaagtaccgtttccacaacgcatcaaatttgttgaggataaccatacgaatattatggaatgcgcgaaagcaccgctggaaaacacttggtgggcggaacaggactcgccgttctgctttctggcgttctgctttgagtatgctggcgtcatcaatagtggtctgtcgtacaactgtagcttgcctctggcatttgatggtagttgctccggcctgcaacatttctcagcgatgttacgcgacgaaattggcggcaaagctgtgaatctcctcccatctgcggaataccaggatatttatcgtatcgtcagcgacaaagttaacgagatgctgaaacaagatctgattaacggtacctctaccaccgtggaaacggtgactgataaaaagacaggcgaaattacccaacgcacgaaatacgggaccaaagttatggcacagtggtggttagaacacggtgtgaatcgtggcgtcacgaaacgcccggttatgactttggtgtatgggagcaaagagtttggattccgcgatcaagtgctgagtgacaccattcaaccggcgatcgataacggcaagggtgacatgtttctgaatccgaatcaggctgctggttacatggcgaaactgatctggaacgcagtgtccgggaccgtagtcgcagcagttgaggcgatgaactggctgaaaagtgcggcgaaattacttgctgctgaagtgaaggatgagaagacggatacagttctgcgtggccgctgcgcagtacattgggtgactcccgacggcttccctgtgtggcaggaatacaagaagcctattcaaacgcgcttgaacctgatgttcctcggtcagttccgcttacagcctaccattaacaccaacaaagatagcgagattgatgcacgcaaacaggtgtctggtatcgctcctaactttgtacacagcctggacggtaaccaccttcgtatgactgtagtgtgggcacacgagaagtacggaatcgaatcttttgcactgattcacgactccttcggtaccattccggctgacgctgcgaacctgttcaaagcagtgcgcgaaactttcgttgacacatatgagtcttgtgatgtactggctgatttctacgaccagattgctgaccagttgcacgagtctcaacgcgacaaaatgccagcacttccggctaaaggtaagttgaacctccgtgacatcttaaaatcggacttcgcgttcgcg

SEQ ID NO: 1692 - protein, 890 aa, synthetic construct
  REGION 1..890: note = Variant of RNA polymerase
MHHHHHHMNTINIAKNDFSDIELAAIPFNTLADHYGERLAREQLALEHESYEMGEARFRKMFERQLKAGEVADNAAAKPLITTLLPKMIARINDWFEEVKAKRGKRPTAFQFLQEIKPEAVAYITIKTTLACLTSADNTTVQAVASAIGRAIEDEARFGRIRDLEAKHFKKNVEEQLNKRVGHVYKKAFMQVVEHDMLSKGLLGGEAWSSWHKEDSIHVGVRCIEMLIESTGMVSLHRQNAGVVGADSETIELAPEYAEAIATRAGALAGISPMFQPCVVPPKPWTGITGGGYWAAGRKPLQLVRTRSLAALRRYEEVSMPEVIKAVNIAQNTAWRINKKVLDVANTITQWKHCPVADVPAMDRGEMPARPLDIDTNEIALKAWKKEASAFYRRDKARMSRRLSMEFMLSQANKFANYEAIWFPQNMDWRGRVYAVPMFNPQGNDMTKGLLTFAQEKPIGEDGFYWLKIHGANTAGVDKVPFPQRIKFVEDNHTNIMECAKAPLENTWWAEQDSPFCFLAFCFEYAGVINSGLSYNCSLPLAFDGSCSGLQHFSAMLRDEIGGKAVNLLPSAEYQDIYRIVSDKVNEMLKQDLINGTSTTVETVTDKKTGEITQRTKYGTKVMAQWWLEHGVNRGVTKRPVMTLVYGSKEFGFRDQVLSDTIQPAIDNGKGDMFLNPNQAAGYMAKLIWNAVSGTVVAAVEAMNWLKSAAKLLAAEVKDEKTDTVLRGRCAVHWVTPDGFPVWQEYKKPIQTRLNLMFLGQFRLQPTINTNKDSEIDARKQVSGIAPNFVHSLDGNHLRMTVVWAHEKYGIESFALIHDSFGTIPADAANLFKAVRETFVDTYESCDVLADFYDQIADQLHESQRDKMPALPAKGKLNLRDILKSDFAFA

SEQ ID NO: 1693 - DNA, 2670 bp, synthetic construct
  misc_feature 1..2670: note = Variant of RNA polymerase
  source 1..2670: mol_type = other DNA
atgcaccatcaccatcaccatatgaacacgattaacattgctaagaacgacttctctgacatcgaactggctgctatcccgttcaacactctggctgaccattacggtgagcgtttagctcgcgaacagttggcccttgagcatgagtcttacgagatgggtgaagcacgcttccgcaagatgtttgagcgtcaacttaaagctggtgaggttgcggataacgctgccgccaagcctctcatcactaccctactccctaagatgattgcacgcatcaacgactggtttgaggaagtgaaagctaagcgcggcaagcgcccgacagccttccagttcctgcaagaaatcaagccggaagccgtagcgtacatcaccattaagaccactctggcttgcctaaccagtgcggacaatacaaccgttcaggctgtagcaagcgcaatcggtcgggccattgaggacgaggctcgcttcggtcgtatccgtgaccttgaagctaagcacttcaagaagaacgttgaggaacaactcaacaagcgcgtagggcacgtctacaagaaagcatttatgcaagttgtcgagcacgacatgctctctaagggtctactcggtggcgaggcgtggtcttcgtggcataaggaagactctattcatgtaggagtacgctgcatcgagatgctcattgagtcaaccggaatggttagcttacaccgccaaaatgctggcgtagtgggtgcagactctgagactatcgaactcgcacctgaatacgctgaggctatcgcaacccgtgcaggtgcgctggctggcatctctccgatgttccaaccttgcgtagttcctcctaagccgtggactggcattactggtggtggctattgggctgcggggcgcaaacccctgcagttagtacgtactcgcgttctggcggcgcttcgccgctatgaagaagtgtcgatgccggaggtcatcaaagcagtcaacattgcgcagaatacagcatggcgtattaacaagaaagttctcgacgtagcgaataccatcacccaatggcagcactgtccagtcgcggatgtgcctgcgatggatcgtggcgaaatgccagctcgtccgttggacatcgataccaacgagattgcacttaaagcgtggaagaaagaagcttccgcgttctaccgcaaagacaaagcacgcatgagccgtcgtctgtcgatggagtttatgttatctcaggcgaacaagtttgcgaattatgaggcaatctggtttccgcaaaacatggattggcgtgggcgcgtgtacgctgtcccgatgttcaatcctcagggcaacgatatgacgaaaggcctgctgacctttgcgcaggagaaacccattggtgaagacggcttctattggctcaagattcatggcgcaaatacagctggagtggataaagtaccgtttccacaacgcatcaaatttgttgaggataaccatacgaatattatggaatgcgcgaaagcaccgctggaaaacacttggtgggcggaacaggactcgccgttctgctttctggcgttctgctttgagtatgctggcgtcatcaatagtggtctgtcgtacaactgtagcttgcctctggcatttgatggtagttgctccggcctgcaacatttctcagcgatgttacgcgacgaaattggcggcaaagctgtgaatctcctcccatctgcggaataccaggatatttatcgtatcgtcagcgacaaagttaacgagatgctgaaacaagatctgattaacggtacctctaccaccgtggaaacggtgactgataaaaagacaggcgaaattacccaacgcacgaaatacgggaccaaagttatggcacagtggtggttagaacacggtgtgaatcgtggcgtcacgaaacgcccggttatgactttggtgtatgggagcaaagagtttggattccgcgatcaagtgctgagtgacaccattcaaccggcgatcgataacggcaagggtgacatgtttctgaatccgaatcaggctgctggttacatggcgaaactgatctggaacgcagtgtccgggaccgtagtcgcagcagttgaggcgatgaactggctgaaaagtgcggcgaaattacttgctgctgaagtgaaggatgagaagacggatacagttctgcgtggccgctgcgcagtacattgggtgactcccgacggcttccctgtgtggcaggaatacaagaagcctattcaaacgcgcttgaacctgatgttcctcggtcagttccgcttacagcctaccattaacaccaacaaagatagcgagattgatgcacgcaaacaggtgtctggtatcgctcctaactttgtacacagcctggacggtaaccaccttcgtatgactgtagtgtgggcacacgagaagtacggaatcgaatcttttgcactgattcacgactccttcggtaccattccggctgacgctgcgaacctgttcaaagcagtgcgcgaaactttcgttgacacatatgagtcttgtgatgtactggctgatttctacgaccagattgctgaccagttgcacgagtctcaacgcgacaaaatgccagcacttccggctaaaggtaagttgaacctccgtgacatcttaaaatcggacttcgcgttcgcg

SEQ ID NO: 1694 - protein, 890 aa, synthetic construct
  REGION 1..890: note = Variant of RNA polymerase
MHHHHHHMNTINIAKNDFSDIELAAIPFNTLADHYGERLAREQLALEHESYEMGEARFRKMFERQLKAGEVADNAAAKPLITTLLPKMIARINDWFEEVKAKRGKRPTAFQFLQEIKPEAVAYITIKTTLACLTSADNTTVQAVASAIGRAIEDEARFGRIRDLEAKHFKKNVEEQLNKRVGHVYKKAFMQVVEHDMLSKGLLGGEAWSSWHKEDSIHVGVRCIEMLIESTGMVSLHRQNAGVVGADSETIELAPEYAEAIATRAGALAGISPMFQPCVVPPKPWTGITGGGYWAAGRKPLQLVRTRVLAALRRYEEVSMPEVIKAVNIAQNTAWRINKKVLDVANTITQWQHCPVADVPAMDRGEMPARPLDIDTNEIALKAWKKEASAFYRKDKARMSRRLSMEFMLSQANKFANYEAIWFPQNMDWRGRVYAVPMFNPQGNDMTKGLLTFAQEKPIGEDGFYWLKIHGANTAGVDKVPFPQRIKFVEDNHTNIMECAKAPLENTWWAEQDSPFCFLAFCFEYAGVINSGLSYNCSLPLAFDGSCSGLQHFSAMLRDEIGGKAVNLLPSAEYQDIYRIVSDKVNEMLKQDLINGTSTTVETVTDKKTGEITQRTKYGTKVMAQWWLEHGVNRGVTKRPVMTLVYGSKEFGFRDQVLSDTIQPAIDNGKGDMFLNPNQAAGYMAKLIWNAVSGTVVAAVEAMNWLKSAAKLLAAEVKDEKTDTVLRGRCAVHWVTPDGFPVWQEYKKPIQTRLNLMFLGQFRLQPTINTNKDSEIDARKQVSGIAPNFVHSLDGNHLRMTVVWAHEKYGIESFALIHDSFGTIPADAANLFKAVRETFVDTYESCDVLADFYDQIADQLHESQRDKMPALPAKGKLNLRDILKSDFAFA

SEQ ID NO: 1695 - DNA, 2670 bp, synthetic construct
  misc_feature 1..2670: note = Variant of RNA polymerase
  source 1..2670: mol_type = other DNA
atgcaccatcaccatcaccatatgaacacgattaacattgctaagaacgacttctctgacatcgaactggctgctatcccgttcaacactctggctgaccattacggtgagcgtttagctcgcgaacagttggcccttgagcatgagtcttacgagatgggtgaagcacgcttccgcaagatgtttgagcgtcaacttaaagctggtgaggttgcggataacgctgccgccaagcctctcatcactaccctactccctaagatgattgcacgcatcaacgactggtttgaggaagtgaaagctaagcgcggcaagcgcccgacagccttccagttcctgcaagaaatcaagccggaagccgtagcgtacatcaccattaagaccactctggcttgcctaaccagtgcggacaatacaaccgttcaggctgtagcaagcgcaatcggtcgggccattgaggacgaggctcgcttcggtcgtatccgtgaccttgaagctaagcacttcaagaagaacgttgaggaacaactcaacaagcgcgtagggcacgtctacaagaaagcatttatgcaagttgtcgagcacgacatgctctctaagggtctactcggtggcgaggcgtggtcttcgtggcataaggaagactctattcatgtaggagtacgctgcatcgagatgctcattgagtcaaccggaatggttagcttacaccgccaaaatgctggcgtagtgggtgcagactctgagactatcgaactcgcacctgaatacgctgaggctatcgcaacccgtgcaggtgcgctggctggcatctctccgatgttccaaccttgcgtagttcctcctaagccgtggactggcattactggtggtggctattgggctgcggggcgcaaacccctgcagttagtacgtactcgcagtctggcggcgcttcgccgctatgaagaagtgtcgatgccggaggtcatcaaagcagtcaacattgcgcagaatacagcatggcgtattaacaagaaagttctcgacgtagcgaataccatcacccaatggaagcactgtccagtcgcggatgtgcctgcgatcgatcgtggcgaaatgccagctcgtccgttggacatcgataccaacgagattgcacttaaagcgtggaagaaagaagcttccgcgttctaccgcaaagacaaagcacgcatgagccgtcgtctgtcgatggagtttatgttatctcaggcgaacaagtttgcgaattatgaggcaatctggtttccgcaaaacatggattggcgtgggcgcgtgtacgctgtcccgatgttcaatcctcagggcaacgatatgacgaaaggcctgctgacctttgcgcaggagaaacccattggtgaagacggcttctattggctcaagattcatggcgcaaatacagctggagtggataaagtaccgtttccacaacgcatcaaatttgttgaggataaccatacgaatattatggaatgcgcgaaagcaccgctggaaaacacttggtgggcggaacaggactcgccgttctgctttctggcgttctgctttgagtatgctggcgtcatcaatagtggtctgtcgtacaactgtagcttgcctctggcatttgatggtagttgctccggcctgcaacatttctcagcgatgttacgcgacgaaattggcggcaaagctgtgaatctcctcccatctgcggaataccaggatatttatcgtatcgtcagcgacaaagttaacgagatgctgaaacaagatctgattaacggtacctctaccaccgtggaaacggtgactgataaaaagacaggcgaaattacccaacgcacgaaatacgggaccaaagttatggcacagtggtggttagaacacggtgtgaatcgtggcgtcacgaaacgcccggttatgactttggtgtatgggagcaaagagtttggattccgcgatcaagtgctgagtgacaccattcaaccggcgatcgataacggcaagggtctgatgtttctgaatccgaatcaggctgctggttacatggcgaaactgatctggaacgcagtgtccgggaccgtagtcgcagcagttgaggcgatgaactggctgaaaagtgcggcgaaattacttgctgctgaagtgaaggatgagaagacggatacagttctgcgtggccgctgcgcagtacattgggtgactcccgacggcttccctgtgtggcaggaatacaagaagcctattcaaacgcgcttgaacctgatgttcctcggtcagttccgcttacagcctaccattaacaccaacaaagatagcgagattgatgcacgcaaacaggtgtctggtatcgctcctaactttgtacacagcctggacggtaaccaccttcgtatgactgtagtgtgggcacacgagaagtacggaatcgaatcttttgcactgattcacgactccttcggtaccattccggctgacgctgcgaacctgttcaaagcagtgcgcgaaactttcgttgacacatatgagtcttgtgatgtactggctgatttctacgaccagattgctgaccagttgcacgagtctcaacgcgacaaaatgccagcacttccggctaaaggtaagttgaacctccgtgacatcttaaaatcggacttcgcgttcgcg

SEQ ID NO: 1696 - protein, 890 aa, synthetic construct
  REGION 1..890: note = Variant of RNA polymerase
MHHHHHHMNTINIAKNDFSDIELAAIPFNTLADHYGERLAREQLALEHESYEMGEARFRKMFERQLKAGEVADNAAAKPLITTLLPKMIARINDWFEEVKAKRGKRPTAFQFLQEIKPEAVAYITIKTTLACLTSADNTTVQAVASAIGRAIEDEARFGRIRDLEAKHFKKNVEEQLNKRVGHVYKKAFMQVVEHDMLSKGLLGGEAWSSWHKEDSIHVGVRCIEMLIESTGMVSLHRQNAGVVGADSETIELAPEYAEAIATRAGALAGISPMFQPCVVPPKPWTGITGGGYWAAGRKPLQLVRTRSLAALRRYEEVSMPEVIKAVNIAQNTAWRINKKVLDVANTITQWKHCPVADVPAIDRGEMPARPLDIDTNEIALKAWKKEASAFYRKDKARMSRRLSMEFMLSQANKFANYEAIWFPQNMDWRGRVYAVPMFNPQGNDMTKGLLTFAQEKPIGEDGFYWLKIHGANTAGVDKVPFPQRIKFVEDNHTNIMECAKAPLENTWWAEQDSPFCFLAFCFEYAGVINSGLSYNCSLPLAFDGSCSGLQHFSAMLRDEIGGKAVNLLPSAEYQDIYRIVSDKVNEMLKQDLINGTSTTVETVTDKKTGEITQRTKYGTKVMAQWWLEHGVNRGVTKRPVMTLVYGSKEFGFRDQVLSDTIQPAIDNGKGLMFLNPNQAAGYMAKLIWNAVSGTVVAAVEAMNWLKSAAKLLAAEVKDEKTDTVLRGRCAVHWVTPDGFPVWQEYKKPIQTRLNLMFLGQFRLQPTINTNKDSEIDARKQVSGIAPNFVHSLDGNHLRMTVVWAHEKYGIESFALIHDSFGTIPADAANLFKAVRETFVDTYESCDVLADFYDQIADQLHESQRDKMPALPAKGKLNLRDILKSDFAFA

SEQ ID NO: 1697 - DNA, 2670 bp, synthetic construct
  misc_feature 1..2670: note = Variant of RNA polymerase
  source 1..2670: mol_type = other DNA
atgcaccatcaccatcaccatatgaacacgattaacattgctaagaacgacttctctgacatcgaactggctgctatcccgttcaacactctggctgaccattacggtgagcgtttagctcgcgaacagttggcccttgagcatgagtcttacgagatgggtgaagcacgcttccgcaagatgtttgagcgtcaacttaaagctggtgaggttgcggataacgctgccgccaagcctctcatcactaccctactccctaagatgattgcacgcatcaacgactggtttgaggaagtgaaaaggaagcgcggcaagcgcccgacagccttccagttcctgcaagaaatcaagccggaagccgtagcgtacatcaccattaagaccactctggcttgcctaaccagtgcggacaatacaaccgttcaggctgtagcaagcgcaatcggtcgggccattgaggacgaggctcgcttcggtcgtatccgtgaccttgaagctaagcacttcaagaagaacgttgaggaacaactcaacaagcgcgtagggcacgtctacaagaaagcatttatgcaagttgtcgagcacgacatgctctctaagggtctactcggtggcgaggcgtggtcttcgtggcataaggaagactctattcatgtaggagtacgctgcatcgagatgctcattgagtcaaccggaatggttagcttacaccgccaaaatgctggcgtagtgggtgcagactctgagactatcgaactcgcacctgaatacgctgaggctatcgcaacccgtgcaggtgcgctggctggcatctctccgatgttccaaccttgcgtagttcctcctaagccgtggactggcattactggtggtggctattgggctgcggggcgcaaacccctgcagttagtacgtactcgcagtctggcggcgcttcgccgctatgaagaagtgtcgatgccggaggtcatcaaagcagtcaacattgcgcagaatacagcatggcgtattaacaagaaagttctcgacgtagcgaataccatcacccaatggcagcactgtccagtcgcggatgtgcctgcgatggatcgtggcgaaatgccagctcgtccgttggacatcgataccaacgagattgcacttaaagcgtggaagaaagaagcttccgcgttctaccgcaaagacaaagcacgcatgagccgtcgtctgtcgatggagtttatgttatctcaggcgaacaagtttgcgaattatgaggcaatctggtttccgcaaaacatggattggcgtgggcgcgtgtacgctgtcccgatgttcaatcctcagggcaacgatatgacgaaaggcctgctgacctttgcgcaggagaaacccattggtgaagacggcttctattggctcaagattcatggcgcaaatacagctggagtggataaagtaccgtttccacaacgcatcaaatttgttgaggataaccatacgaatattatggaatgcgcgaaagcaccgctggaaaacacttggtgggcggaacaggactcgccgttctgctttctggcgttctgctttgagtatgctggcgtcatcaatagtggtctgtcgtacaactgtagcttgcctctggcatttgatggtagttgctccggcctgcaacatttctcagcgatgttacgcgacgaaattggcggcaaagctgtgaatctcctcccatctgcggaataccaggatatttatcgtatcgtcagcgacaaagttaacgagatgctgaaacaagatctgattaacggtacctctaccaccgtggaaacggtgactgataaaaagacaggcgaaattacccaacgcacgaaatacgggaccaaagttatggcacagtggtggttagaacacggtgtgaatcgtggcgtcacgaaacgcccggttatgactttggtgtatgggagcaaagagtttggattccgcgatcaagtgctgagtgacaccattcaaccggcgatcgataacggcaagggtgacatgtttctgaatccgaatcaggctgctggttacatggcgaaactgatctggaacgcagtgtccgggaccgtagtcgcagcagttgaggcgatgaactggctgaaaagtgcggcgaaattacttgctgctgaagtgaaggatgagaagacggatacagttctgcgtggccgctgcgcagtacattgggtgactcccgacggcttccctgtgtggcaggaatacaagaagcctattcaaacgcgcttgaacctgatgttcctcggtcagttccgcttacagcctaccattaacaccaacaaagatagcgagattgatgcacgcaaacaggtgtctggtatcgctcctaactttgtacacagcctggacggtaaccaccttcgtatgactgtagtgtgggcacacgagaagtacggaatcgaatcttttgcactgattcacgactccttcggtaccattccggctgacgctgcgaacctgttcaaagcagtgcgcgaaactttcgttgacacatatgagtcttgtgatgtactggctgatttctacgaccagattgctgaccagttgcacgagtctcaacgcgacaaaatgccagcacttccggctaaaggtaagttgaacctccgtgacatcttaaaatcggacttcgcgttcgcg

SEQ ID NO: 1698 - protein, 890 aa, synthetic construct
  REGION 1..890: note = Variant of RNA polymerase
MHHHHHHMNTINIAKNDFSDIELAAIPFNTLADHYGERLAREQLALEHESYEMGEARFRKMFERQLKAGEVADNAAAKPLITTLLPKMIARINDWFEEVKRKRGKRPTAFQFLQEIKPEAVAYITIKTTLACLTSADNTTVQAVASAIGRAIEDEARFGRIRDLEAKHFKKNVEEQLNKRVGHVYKKAFMQVVEHDMLSKGLLGGEAWSSWHKEDSIHVGVRCIEMLIESTGMVSLHRQNAGVVGADSETIELAPEYAEAIATRAGALAGISPMFQPCVVPPKPWTGITGGGYWAAGRKPLQLVRTRSLAALRRYEEVSMPEVIKAVNIAQNTAWRINKKVLDVANTITQWQHCPVADVPAMDRGEMPARPLDIDTNEIALKAWKKEASAFYRKDKARMSRRLSMEFMLSQANKFANYEAIWFPQNMDWRGRVYAVPMFNPQGNDMTKGLLTFAQEKPIGEDGFYWLKIHGANTAGVDKVPFPQRIKFVEDNHTNIMECAKAPLENTWWAEQDSPFCFLAFCFEYAGVINSGLSYNCSLPLAFDGSCSGLQHFSAMLRDEIGGKAVNLLPSAEYQDIYRIVSDKVNEMLKQDLINGTSTTVETVTDKKTGEITQRTKYGTKVMAQWWLEHGVNRGVTKRPVMTLVYGSKEFGFRDQVLSDTIQPAIDNGKGDMFLNPNQAAGYMAKLIWNAVSGTVVAAVEAMNWLKSAAKLLAAEVKDEKTDTVLRGRCAVHWVTPDGFPVWQEYKKPIQTRLNLMFLGQFRLQPTINTNKDSEIDARKQVSGIAPNFVHSLDGNHLRMTVVWAHEKYGIESFALIHDSFGTIPADAANLFKAVRETFVDTYESCDVLADFYDQIADQLHESQRDKMPALPAKGKLNLRDILKSDFAFA

SEQ ID NO: 1699 - DNA, 2670 bp, synthetic construct
  misc_feature 1..2670: note = Variant of RNA polymerase
  source 1..2670: mol_type = other DNA
atgcaccatcaccatcaccatatgaacacgattaacattgctaagaacgacttctctgacatcgaactggctgctatcccgttcaacactctggctgaccattacggtgagcgtttagctcgcgaacagttggcccttgagcatgagtcttacgagatgggtgaagcacgcttccgcaagatgtttgagcgtcaacttaaagctggtgaggttgcggataacgctgccgccaagcctctcatcactaccctactccctaagatgattgcacgcatcaacgactggtttgaggaagtgaaagctaagcgcggcaagcgcccgacagccttccagttcctgcaagaaatcaagccggaagccgtagcgtacatcaccattaagaccactctggcttgcctaaccagtgcggacaatacaaccgttcaggctgtagcaagcgcaatcggtcgggccattgaggacgaggctcgcttcggtcgtatccgtgaccttgaagctaagcacttcaagaagaacgttgaggaacaactcaacaagcgcgtagggcacgtctacaagaaagcatttatgcaagttgtcgagcacgacatgctctctaagggtctactcggtggcgaggcgtggtcttcgtggcataaggaagactctattcatgtaggagtacgctgcatcgagatgctcattgagtcaaccggaatggttagcttacaccgccaaaatgctggcgtagtgggtgcagactctgagactatcgaactcgcacctgaatacgctgaggctatcgcaacccgtgcaggtgcgctggctggcatctctccgatgttccaaccttgcgtagttcctcctaagccgtggactggcattactggtggtggctattgggctgcggggcgcaaacccctgcagttagtacgtactcgctggctggcggcgcttcgccgctatgaagaagtgtcgatgccggaggtcatcaaagcagtcaacattgcgcagaatacagcatggcgtattaacaagaaagttctcgacgtagcgaataccatcacccaatggcagcactgtccagtcgcggatgtgcctgcgatggatcgtggcgaaatgccagctcgtccgttggacatcgataccaacgagattgcacttaaagcgtggaagaaagaagcttccgcgttctaccgcaaagacaaagcacgcatgagccgtcgtctgtcgatggagtttatgttatctcaggcgaacaagtttgcgaattatgaggcaatctggtttccgcaaaacatggattggcgtgggcgcgtgtacgctgtcccgatgttcaatcctcagggcaacgatatgacgaaaggcctgctgacctttgcgcaggagaaacccattggtgaagacggcttctattggctcaagattcatggcgcaaatacagctggagtggataaagtaccgtttccacaacgcatcaaatttgttgaggataaccatacgaatattatggaatgcgcgaaagcaccgctggaaaacacttggtgggcggaacaggactcgccgttctgctttctggcgttctgctttgagtatgctggcgtcatcaatagtggtctgtcgtacaactgtagcttgcctctggcatttgatggtagttgctccggcctgcaacatttctcagcgatgttacgcgacgaaattggcggcaaagctgtgaatctcctcccatctgcggaataccaggatatttatcgtatcgtcagcgacaaagttaacgagatgctgaaacaagatctgattaacggtacctctaccaccgtggaaacggtgactgataaaaagacaggcgaaattacccaacgcacgaaatacgggaccaaagttatggcacagtggtggttagaacacggtgtgaatcgtggcgtcacgaaacgcccggttatgactttggtgtatgggagcaaagagtttggattccgcgatcaagtgctgagtgacaccattcaaccggcgatcgataacggcaagggtgacatgtttctgaatccgaatcaggctgctggttacatggcgaaactgatctggaacgcagtgtccgggaccgtagtcgcagcagttgaggcgatgaactggctgaaaagtgcggcgaaattacttgctgctgaagtgaaggatgagaagacggatacagttctgcgtggccgctgcgcagtacattgggtgactcccgacggcttccctgtgtggcaggaatacaagaagcctattcaaacgcgcttgaacctgatgttcctcggtcagttccgcttacagcctaccattaacaccaacaaagatagcgagattgatgcacgcaaacaggtgtctggtatcgctcctaactttgtacacagcctggacggtaaccaccttcgtatgactgtagtgtgggcacacgagaagtacggaatcgaatcttttgcactgattcacgactccttcggtaccattccggctgacgctgcgaacctgttcaaagcagtgcgcgaaactttcgttgacacatatgagtcttgtgatgtactggctgatttctacgaccagattgctgaccagttgcacgagtctcaacgcgacaaaatgccagcacttccggctaaaggtaagttgaacctccgtgacatcttaaaatcggacttcgcgttcgcg

SEQ ID NO: 1700 - protein, 890 aa, synthetic construct
  REGION 1..890: note = Variant of RNA polymerase
MHHHHHHMNTINIAKNDFSDIELAAIPFNTLADHYGERLAREQLALEHESYEMGEARFRKMFERQLKAGEVADNAAAKPLITTLLPKMIARINDWFEEVKAKRGKRPTAFQFLQEIKPEAVAYITIKTTLACLTSADNTTVQAVASAIGRAIEDEARFGRIRDLEAKHFKKNVEEQLNKRVGHVYKKAFMQVVEHDMLSKGLLGGEAWSSWHKEDSIHVGVRCIEMLIESTGMVSLHRQNAGVVGADSETIELAPEYAEAIATRAGALAGISPMFQPCVVPPKPWTGITGGGYWAAGRKPLQLVRTRWLAALRRYEEVSMPEVIKAVNIAQNTAWRINKKVLDVANTITQWQHCPVADVPAMDRGEMPARPLDIDTNEIALKAWKKEASAFYRKDKARMSRRLSMEFMLSQANKFANYEAIWFPQNMDWRGRVYAVPMFNPQGNDMTKGLLTFAQEKPIGEDGFYWLKIHGANTAGVDKVPFPQRIKFVEDNHTNIMECAKAPLENTWWAEQDSPFCFLAFCFEYAGVINSGLSYNCSLPLAFDGSCSGLQHFSAMLRDEIGGKAVNLLPSAEYQDIYRIVSDKVNEMLKQDLINGTSTTVETVTDKKTGEITQRTKYGTKVMAQWWLEHGVNRGVTKRPVMTLVYGSKEFGFRDQVLSDTIQPAIDNGKGDMFLNPNQAAGYMAKLIWNAVSGTVVAAVEAMNWLKSAAKLLAAEVKDEKTDTVLRGRCAVHWVTPDGFPVWQEYKKPIQTRLNLMFLGQFRLQPTINTNKDSEIDARKQVSGIAPNFVHSLDGNHLRMTVVWAHEKYGIESFALIHDSFGTIPADAANLFKAVRETFVDTYESCDVLADFYDQIADQLHESQRDKMPALPAKGKLNLRDILKSDFAFA

SEQ ID NO: 1701 - DNA, 2670 bp, synthetic construct
  misc_feature 1..2670: note = Variant of RNA polymerase
  source 1..2670: mol_type = other DNA
atgcaccatcaccatcaccatatgaacacgattaacattgctaagaacgacttctctgacatcgaactggctgctatcccgttcaacactctggctgaccattacggtgagcgtttagctcgcgaacagttggcccttgagcatgagtcttacgagatgggtgaagcacgcttccgcaagatgtttgagcgtcaacttaaagctggtgaggttgcggataacgctgccgccaagcctctcatcactaccctactccctaagatgattgcacgcatcaacgactggtttgaggaagtgaaagctaagcgcggcaagcgcccgacagccttccagttcctgcaagaaatcaagccggaagccgtagcgtacatcaccattaagaccactctggcttgcctaaccagtgcggacaatacaaccgttcaggctgtagcaagcgcaatcggtcgggccattgaggacgaggctcgcttcggtcgtatccgtgaccttgaagctaagcacttcaagaagaacgttgaggaacaactcaacaagcgcgtagggcacgtctacaagaaagcatttatgcaagttgtcgagcacgacatgctctctaagggtctactcggtggcgaggcgtggtcttcgtggcataaggaagactctattcatgtaggagtacgctgcatcgagatgctcattgagtcaaccggaatggttagcttacaccgccaaaatgctggcgtagtgggtgcagactctgagactatcgaactcgcacctgaatacgctgaggctatcgcaacccgtgcaggtgcgctggctggcatctctccgatgttccaaccttgcgtagttcctcctaagccgtggactggcattactggtggtggctattgggctgcggggcgcaaacccctgcagttagtacgtactcgcagtctggcggcgcttcgccgctatgaagaagtgtcgatgccggaggtcatcaaagcagtcaacattgcgcagaatacagcatggcgtattaacaagaaagttctcgacgtagcgaataccatcacccaatggcagcactgtccagtcgccgatgtgcctgcgatggatcgtggcgaaatgccagctcgcccgttggacatcgataccaacgagattgcacttaaagcgtggaagaaagaagcttccgcgttctaccgcaaagacaaagcacgcatgagccgtcgtctgtcgatggagtttatgttatctcaggcgaacaagtttgcgaattatgaggcaatctggtttccgcaaaacatggattggcgtgggcgcgtgtacgctgtcccgatgttcaatcctcagggcaacgatatgacgaaaggcctgctgacctttgcgcaggagaaacccattggtgaagacggcttctattggctcaagattcatggcgcaaatacagctggagtggataaagtaccgtttccacaacgcatcaaatttgttgaggataaccatacgaatattatggaatgcgcgaaagcaccgctggaaaacacttggtgggcggaacaggactcgccgttctgctttctggcgttctgctttgagtatgctggcgtcatcaatagtggtctgtcgtacaactgtagcttgcctctggcatttgatggtagttgctccggcctgcaacatttctcagcgatgttacgcgacgaagttggcggcaaagctgtgaatctcctcccatctgcggaataccaggatatttatggtatcgtcagcgacaaagttaacgagatgctgaaacaagatctgattaacggtacctctaccaccgtggaaacggtgactgataaaaagacaggcgaaattacccaacgcacgaaatacgggaccaaagttatggcacagtggtggttagcgcacggtgtgaatcgtggcgtcacgaaacgcccggttatgactttggtgtatgggagcaaagagtttggattccgcgatcaagtgctgagtgacaccattcaaccggcgatcgataacggcaagggtctgatgtttctgaatccgaatcaggctgctggttacatggcgaaactgatctggaacgcagtgtccgggaccgtagtcgcagcagttgaggcgatgaactggctgaaaagtgcggcgaaattacttgctgctgaagtgaaggatgagaagacggatacaattctgcgtggccgctgcgcagtacattgggtgactcccgacggcttccctgtgtggcaggaatacaagaagcctattcaaacgcgcttgaacctgatgttcctcggtcagttccgcttacagcctaccattaacaccaacaaagatagcgagattgatgcacgcaaacaggtgtctggtatcgctcctaactttgtacacagcctggacggtaaccaccttcgtatgactgtagtgtgggcacacgagaagtacggaatcgaatcttttgcactgattcacgactccttcggtaccattccggctgacgctgcgaacctgttcaaagcagtgcgcgaaactttcgttgacacatatgagtcttgtgatgtactggctgatttctacgaccagattgctgaccagttgcacgagtctcaacgcgacaaaatgccagcacttccggctaaaggtaagttgaacctccgtgacatcttaaaatcggacttcgcgttcgcg

SEQ ID NO: 1702 - protein, 890 aa, synthetic construct
  REGION 1..890: note = Variant of RNA polymerase
MHHHHHHMNTINIAKNDFSDIELAAIPFNTLADHYGERLAREQLALEHESYEMGEARFRKMFERQLKAGEVADNAAAKPLITTLLPKMIARINDWFEEVKAKRGKRPTAFQFLQEIKPEAVAYITIKTTLACLTSADNTTVQAVASAIGRAIEDEARFGRIRDLEAKHFKKNVEEQLNKRVGHVYKKAFMQVVEHDMLSKGLLGGEAWSSWHKEDSIHVGVRCIEMLIESTGMVSLHRQNAGVVGADSETIELAPEYAEAIATRAGALAGISPMFQPCVVPPKPWTGITGGGYWAAGRKPLQLVRTRSLAALRRYEEVSMPEVIKAVNIAQNTAWRINKKVLDVANTITQWQHCPVADVPAMDRGEMPARPLDIDTNEIALKAWKKEASAFYRKDKARMSRRLSMEFMLSQANKFANYEAIWFPQNMDWRGRVYAVPMFNPQGNDMTKGLLTFAQEKPIGEDGFYWLKIHGANTAGVDKVPFPQRIKFVEDNHTNIMECAKAPLENTWWAEQDSPFCFLAFCFEYAGVINSGLSYNCSLPLAFDGSCSGLQHFSAMLRDEVGGKAVNLLPSAEYQDIYGIVSDKVNEMLKQDLINGTSTTVETVTDKKTGEITQRTKYGTKVMAQWWLAHGVNRGVTKRPVMTLVYGSKEFGFRDQVLSDTIQPAIDNGKGLMFLNPNQAAGYMAKLIWNAVSGTVVAAVEAMNWLKSAAKLLAAEVKDEKTDTILRGRCAVHWVTPDGFPVWQEYKKPIQTRLNLMFLGQFRLQPTINTNKDSEIDARKQVSGIAPNFVHSLDGNHLRMTVVWAHEKYGIESFALIHDSFGTIPADAANLFKAVRETFVDTYESCDVLADFYDQIADQLHESQRDKMPALPAKGKLNLRDILKSDFAFA

SEQ ID NO: 1703 - DNA, 2670 bp, synthetic construct
  misc_feature 1..2670: note = Variant of RNA polymerase
  source 1..2670: mol_type = other DNA
atgcaccatcaccatcaccatatgaacacgattaacattgctaagaacgacttctctgacatcgaactggctgctatcccgttcaacactctggctgaccattacggtgagcgtttagctcgcgaacagttggcccttgagcatgagtcttacgagatgggtgaagcacgcttccgcaagatgtttgagcgtcaacttaaagctggtgaggttgcggataacgctgccgccaagcctctcatcactaccctactccctaagatgattgcacgcatcaacgactggtttgaggaagtgaaagctaagcgcggcaagcgcccgacagccttccagttcctgcaagaaatcaagccggaagccgtagcgtacatcaccattaagaccactctggcttgcctaaccagtgcggacaatacaaccgttcaggctgtagcaagcgcaatcggtcgggccattgaggacgaggctcgcttcggtcgtatccgtgaccttgaagctaagcacttcaagaagaacgttgaggaacaactcaacaagcgcgtagggcacgtctacaagaaagcatttatgcaagttgtcgagcacgacatgctctctaagggtctactcggtggcgaggcgtggtcttcgtggcataaggaagactctattcatgtaggagtacgctgcatcgagatgctcattgagtcaaccggaatggttagcttacaccgccaaaatgctggcgtagtgggtgcagactctgagactatcgaactcgcacctgaatacgctgaggctatcgcaacccgtgcaggtgcgctggctggcatctctccgatgttccaaccttgcgtagttcctcctaagccgtggactggcattactggtggtggctattgggctgcggggcgcaaacccctgcagttagtacgtactcgcagtctggcgtttcttcgccgctatgaagaagtgtcgatgccggaggtcatcaaagcagtcaacattgcgcagaatacagcatggcgtattaacaagaaagttctcgacgtagcgaataccatcacccaatggcagcactgtccagtcgcggatgtgcctgcgatggatcgtggcgaaatgccagctcgtccgttggacatcgataccaacgagattgcacttaaagcgtggaagaaagaagcttccgcgttctaccgcaaagacaaagcacgcatgagccgtcgtctgtcgatggagtttatgttatctcaggcgaacaagtttgcgaattatgaggcaatctggtttccgcaaaacatggattggcgtgggcgcgtgtacgctgtcccgatgttcaatcctcagggcaacgatatgacgaaaggcctgctgacctttgcgcaggagaaacccattggtgaagacggcttctattggctcaagattcatggcgcaaatacagctggagtggataaagtaccgtttccacaacgcatcaaatttgttgaggataaccatacgaatattatggaatgcgcgaaagcaccgctggaaaacacttggtgggcggaacaggactcgccgttctgctttctggcgttctgctttgagtatgctggcgtcatcaatagtggtctgtcgtacaactgtagcttgcctctggcatttgatggtagttgctccggcctgcaacatttctcagcgatgttacgcgacgaaattggcggcaaagctgtgaatctcctcccatctgcggaataccaggatatttatcgtatcgtcagcgacaaagttaacgagatgctgaaacaagatctgattaacggtacctctaccaccgtggaaacggtgactgataaaaagacaggcgaaattacccaacgcacgaaatacgggaccaaagttatggcacagtggtggttagaacacggtgtgaatcgtggcgtcacgaaacgcccggttatgactttggtgtatgggagcaaagagtttggattccgcgatcaagtgctgagtgacaccattcaaccggcgatcgataacggcaagggtgacatgtttctgaatccgaatcaggctgctggttacatggcgaaactgatctggaacgcagtgtccgggaccgtagtcgcagcagttgaggcgatgaactggctgaaaagtgcggcgaaattacttgctgctgaagtgaaggatgagaagacggatacagttctgcgtggccgctgcgcagtacattgggtgactcccgacggcttccctgtgtggcaggaatacaagaagcctattcaaacgcgcttgaacctgatgttcctcggtcagttccgcttacagcctaccattaacaccaacaaagatagcgagattgatgcacgcaaacaggtgtctggtatcgctcctaactttgtacacagcctggacggtaaccaccttcgtatgactgtagtgtgggcacacgagaagtacggaatcgaatcttttgcactgattcacgactccttcggtaccattccggctgacgctgcgaacctgttcaaagcagtgcgcgaaactttcgttgacacatatgagtcttgtgatgtactggctgatttctacgaccagattgctgaccagttgcacgagtctcaacgcgacaaaatgccagcacttccggctaaaggtaagttgaacctccgtgacatcttaaaatcggacttcgcgttcgcg

SEQ ID NO: 1704 - protein, 890 aa, synthetic construct
  REGION 1..890: note = Variant of RNA polymerase
MHHHHHHMNTINIAKNDFSDIELAAIPFNTLADHYGERLAREQLALEHESYEMGEARFRKMFERQLKAGEVADNAAAKPLITTLLPKMIARINDWFEEVKAKRGKRPTAFQFLQEIKPEAVAYITIKTTLACLTSADNTTVQAVASAIGRAIEDEARFGRIRDLEAKHFKKNVEEQLNKRVGHVYKKAFMQVVEHDMLSKGLLGGEAWSSWHKEDSIHVGVRCIEMLIESTGMVSLHRQNAGVVGADSETIELAPEYAEAIATRAGALAGISPMFQPCVVPPKPWTGITGGGYWAAGRKPLQLVRTRSLAFLRRYEEVSMPEVIKAVNIAQNTAWRINKKVLDVANTITQWQHCPVADVPAMDRGEMPARPLDIDTNEIALKAWKKEASAFYRKDKARMSRRLSMEFMLSQANKFANYEAIWFPQNMDWRGRVYAVPMFNPQGNDMTKGLLTFAQEKPIGEDGFYWLKIHGANTAGVDKVPFPQRIKFVEDNHTNIMECAKAPLENTWWAEQDSPFCFLAFCFEYAGVINSGLSYNCSLPLAFDGSCSGLQHFSAMLRDEIGGKAVNLLPSAEYQDIYRIVSDKVNEMLKQDLINGTSTTVETVTDKKTGEITQRTKYGTKVMAQWWLEHGVNRGVTKRPVMTLVYGSKEFGFRDQVLSDTIQPAIDNGKGDMFLNPNQAAGYMAKLIWNAVSGTVVAAVEAMNWLKSAAKLLAAEVKDEKTDTVLRGRCAVHWVTPDGFPVWQEYKKPIQTRLNLMFLGQFRLQPTINTNKDSEIDARKQVSGIAPNFVHSLDGNHLRMTVVWAHEKYGIESFALIHDSFGTIPADAANLFKAVRETFVDTYESCDVLADFYDQIADQLHESQRDKMPALPAKGKLNLRDILKSDFAFA

SEQ ID NO: 1705 - DNA, 2670 bp, synthetic construct
  misc_feature 1..2670: note = Variant of RNA polymerase
  source 1..2670: mol_type = other DNA
atgcaccatcaccatcaccatatgaacacgattaacattgctaagaacgacttctctgacatcgaactggctgctatcccgttcaacactctggctgaccattacggtgagcgtttagctcgcgaacagttggcccttgagcatgagtcttacgagatgggtgaagcacgcttccgcaagatgtttgagcgtcaacttaaagctggtgaggttgcggataacgctgccgccaagcctctcatcactaccctactccctaagatgattgcacgcatcaacgactggtttgaggaagtgaaagctaagcgcggcaagcgcccgacagccttccagttcctgcaagaaatcaagccggaagccgtagcgtacatcaccattaagaccactctggcttgcctaaccagtgcggacaatacaaccgttcaggctgtagcaagcgcaatcggtcgggccattgaggacgaggctcgcttcggtcgtatccgtgaccttgaagctaagcacttcaagaagaacgttgaggaacaactcaacaagcgcgtagggcacgtctacaagaaagcatttatgcaagttgtcgagcacgacatgctctctaagggtctactcggtggcgaggcgtggtcttcgtggcataaggaagactctattcatgtaggagtacgctgcatcgagatgctcattgagtcaaccggaatggttagcttacaccgccaaaatgctggcgtagtgggtgcagactctgagactatcgaactcgcacctgaatacgctgaggctatcgcaacccgtgcaggtgcgctggctggcatctctccgatgttccaaccttgcgtagttcctcctaagccgtggactggcattactggtggtggctattgggctgcggggcgcaaacccctgcagttagtacgtactcgcagtctggcggcgcttcgccgctatgaagaagtgtcgatgccggaggtcatcaaagcagtcaacattgcgcagaatacagcatggcgtattaacaagaaagttctcgacgtagcgaataccatcacccaatggaagcactgtccagtcgcggatgtgcctgcgatggatcgtggcgaaatgccagctcgtccgttggacatcgataccaacgagattgcacttaaagcgtggaagaaagaagcttccgcgttctaccgcaaagacaaagcacgcatgagccgtcgtctgtcgatggagtttatgttatctcaggcgaacaagtttgcgaattatgaggcaatctggtttccgcaaaacatggattggcgtgggcgcgtgtacgctgtcccgatgttcaatcctcagggcaacgatatgacgaaaggcctgctgacctttgcgcaggagaaacccattggtgaagacggcttctattggctcaagattcatggcgcaaatacagctggagtggataaagtaccgtttccacaacgcatcaaatttgttgaggataaccatacgaatattatggaatgcgcgaaagcaccgctggaaaacacttggtgggcggaacaggactcgccgttctgctttctggcgttctgctttgagtatgctggcgtcatcaatagtggtctgtcgtacaactgtagcttgcctctggcatttgatggtagttgctccggcctgcaacatttctcagcgatgttacgcgacgaaattggcggcaaagctgtgaatctcctcccatctgcggaataccaggatatttatcgtatcgtcagcgacaaagttaacgagatgctgaaacaagatctgattaacggtacctctaccaccgtggaaacggtgactgataaaaagacaggcgaaattacccaacgcacgaaatacgggaccaaagttatggcagggtggtggttagaacacggtgtgaatcgtggcgtcacgaaacgcccggttatgactttggtgtatgggagcaaagagtttggattccgcgatcaagtgctgagtgacaccattcaaccggcgatcgataacggcaagggtgacatgtttctgaatccgaatcaggctgctggttacatggcgaaactgatctggaacgcagtgtccgggaccgtagtcgcagcagttgaggcgatgaactggctgaaaagtgcggcgaaattacttgctgctgaagtgaaggatgagaagacggatacagttctgcgtggccgctgcgcagtacattgggtgactcccgacggcttccctgtgtggcaggaatacaagaagcctattcaaacgcgcttgaacctgatgttcctcggtcagttccgcttacagcctaccattaacaccaacaaagatagcgagattgatgcacgcaaacaggtgtctggtatcgctcctaactttgtacacagcctggacggtaaccaccttcgtatgactgtagtgtgggcacacgagaagtacggaatcgaatcttttgcactgattcacgactccttcggtaccattccggctgacgctgcgaacctgttcaaagcagtgcgcgaaactttcgttgacacatatgagtcttgtgatgtactggctgatttctacgaccagattgctgaccagttgcacgagtctcaacgcgacaaaatgccagcacttccggctaaaggtaagttgaacctccgtgacatcttaaaatcggacttcgcgttcgcg

SEQ ID NO: 1706 - protein, 890 aa, synthetic construct
  REGION 1..890: note = Variant of RNA polymerase
MHHHHHHMNTINIAKNDFSDIELAAIPFNTLADHYGERLAREQLALEHESYEMGEARFRKMFERQLKAGEVADNAAAKPLITTLLPKMIARINDWFEEVKAKRGKRPTAFQFLQEIKPEAVAYITIKTTLACLTSADNTTVQAVASAIGRAIEDEARFGRIRDLEAKHFKKNVEEQLNKRVGHVYKKAFMQVVEHDMLSKGLLGGEAWSSWHKEDSIHVGVRCIEMLIESTGMVSLHRQNAGVVGADSETIELAPEYAEAIATRAGALAGISPMFQPCVVPPKPWTGITGGGYWAAGRKPLQLVRTRSLAALRRYEEVSMPEVIKAVNIAQNTAWRINKKVLDVANTITQWKHCPVADVPAMDRGEMPARPLDIDTNEIALKAWKKEASAFYRKDKARMSRRLSMEFMLSQANKFANYEAIWFPQNMDWRGRVYAVPMFNPQGNDMTKGLLTFAQEKPIGEDGFYWLKIHGANTAGVDKVPFPQRIKFVEDNHTNIMECAKAPLENTWWAEQDSPFCFLAFCFEYAGVINSGLSYNCSLPLAFDGSCSGLQHFSAMLRDEIGGKAVNLLPSAEYQDIYRIVSDKVNEMLKQDLINGTSTTVETVTDKKTGEITQRTKYGTKVMAGWWLEHGVNRGVTKRPVMTLVYGSKEFGFRDQVLSDTIQPAIDNGKGDMFLNPNQAAGYMAKLIWNAVSGTVVAAVEAMNWLKSAAKLLAAEVKDEKTDTVLRGRCAVHWVTPDGFPVWQEYKKPIQTRLNLMFLGQFRLQPTINTNKDSEIDARKQVSGIAPNFVHSLDGNHLRMTVVWAHEKYGIESFALIHDSFGTIPADAANLFKAVRETFVDTYESCDVLADFYDQIADQLHESQRDKMPALPAKGKLNLRDILKSDFAFA

SEQ ID NO: 1707 - DNA, 2670 bp, synthetic construct
  misc_feature 1..2670: note = Variant of RNA polymerase
  source 1..2670: mol_type = other DNA
atgcaccatcaccatcaccatatgaacacgattaacattgctaagaacgacttctctgacatcgaactggctgctatcccgttcaacactctggctgaccattacggtgagcgtttagctcgcgaacagttggcccttgagcatgagtcttacgagatgggtgaagcacgcttccgcaagatgtttgagcgtcaacttaaagctggtgaggttgcggataacgctgccgccaagcctctcatcactaccctactccctaagatgattgcacgcatcaacgactggtttgaggaagtgaaagctaagcgcggcaagcgcccgacagccttccagttcctgcaagaaatcaagccggaagccgtagcgtacatcaccattaagaccactctggcttgcctaaccagtgcggacaatacaaccgttcaggctgtagcaagcgcaatcggtcgggccattgaggacgaggctcgcttcggtcgtatccgtgaccttgaagctaagcacttcaagaagaacgttgaggaacaactcaacaagcgcgtagggcacgtctacaagaaagcatttatgcaagttgtcgagcacgacatgctctctaagggtctactcggtggcgaggcgtggtcttcgtggcataaggaagactctattcatgtaggagtacgctgcatcgagatgctcattgagtcaaccggaatggttagcttacaccgccaaaatgctggcgtagtgggtgcagactctgagactatcgaactcgcacctgaatacgctgaggctatcgcaacccgtgcaggtgcgctggctggcatctctccgatgttccaaccttgcgtagttcctcctaagccgtggactggcattactggtggtggctattgggctgcggggcgcaaacccctgcagttagtacgtactcgcagtctggcggcgcttcgccgctatgaagaagtgtcgatgccggaggtcatcaaagcagtcaacattgcgcagaatacagcatggcgtattaacaagaaagttctcgacgtagcgaataccatcacccaatggcagcactgtccagtcgcggatgtgcctgcgatggatcgtggcgaaatgccagctcgtccgttggacatcgataccaacgagattgcacttaaagcgtggaagaaagaagcttccgcgttctaccgcaaagacaaagcacgcatgagccgtcgtctgtcgatggagtttatgttatctcaggcgaacaagtttgcgaattatgaggcaatctggtttccgcaaaacatggattggcgtgggcgcgtgtacgctgtcccgatgttcaatcctcagggcaacgatatgacgaaaggcctgctgacctttgcgcaggagaaacccattggtgaagacggcttctattggctcaagattcatggcgcaaatacagctggagtggataaagtaccgtttccacaacgcatcaaatttgttgaggataaccatacgaatattatggaatgcgcgaaagcaccgctggaaaacacttggtgggcggaacaggactcgccgttctgctttctggcgttctgctttgagtatgctggcgtcatcaatagtggtctgtcgtacaactgtagcttgcctctggcatttgatggtagttgctccggcctgcaacatttctcagcgatgttacgcgacgaaattggcggcaaagctgtgaatctcctcccatctgcggaataccaggatatttatcgtatcgtcagcgacaaagttaacgagatgctgaaacaagatctgattaacggtacctctaccaccgtggaaacggtgactgataaaaagacaggcgaaattacccaacgcacgaaatacgggaccaaagttatggcacagtggtggttagaacacggtgtgaatcgtggcgtcacgaaacgcccggttatgactttggtgtatgggagcaaagagtttggattccgcgatcaagtgaggagtgacaccattcaaccggcgatcgataacggcaagggtgacatgtttctgaatccgaatcaggctgctggttacatggcgaaactgatctggaacgcagtgtccgggaccgtagtcgcagcagttgaggcgatgaactggctgaaaagtgcggcgaaattacttgctgctgaagtgaaggatgagaagacggatacagttctgcgtggccgctgcgcagtacattgggtgactcccgacggcttccctgtgtggcaggaatacaagaagcctattcaaacgcgcttgaacctgatgttcctcggtcagttccgcttacagcctaccattaacaccaacaaagatagcgagattgatgcacgcaaacaggtgtctggtatcgctcctaactttgtacacagcctggacggtaaccaccttcgtatgactgtagtgtgggcacacgagaagtacggaatcgaatcttttgcactgattcacgactccttcggtaccattccggctgacgctgcgaacctgttcaaagcagtgcgcgaaactttcgttgacacatatgagtcttgtgatgtactggctgatttctacgaccagattgctgaccagttgcacgagtctcaacgcgacaaaatgccagcacttccggctaaaggtaagttgaacctccgtgacatcttaaaatcggacttcgcgttcgcg

SEQ ID NO: 1708 - protein, 890 aa, synthetic construct
  REGION 1..890: note = Variant of RNA polymerase
MHHHHHHMNTINIAKNDFSDIELAAIPFNTLADHYGERLAREQLALEHESYEMGEARFRKMFERQLKAGEVADNAAAKPLITTLLPKMIARINDWFEEVKAKRGKRPTAFQFLQEIKPEAVAYITIKTTLACLTSADNTTVQAVASAIGRAIEDEARFGRIRDLEAKHFKKNVEEQLNKRVGHVYKKAFMQVVEHDMLSKGLLGGEAWSSWHKEDSIHVGVRCIEMLIESTGMVSLHRQNAGVVGADSETIELAPEYAEAIATRAGALAGISPMFQPCVVPPKPWTGITGGGYWAAGRKPLQLVRTRSLAALRRYEEVSMPEVIKAVNIAQNTAWRINKKVLDVANTITQWQHCPVADVPAMDRGEMPARPLDIDTNEIALKAWKKEASAFYRKDKARMSRRLSMEFMLSQANKFANYEAIWFPQNMDWRGRVYAVPMFNPQGNDMTKGLLTFAQEKPIGEDGFYWLKIHGANTAGVDKVPFPQRIKFVEDNHTNIMECAKAPLENTWWAEQDSPFCFLAFCFEYAGVINSGLSYNCSLPLAFDGSCSGLQHFSAMLRDEIGGKAVNLLPSAEYQDIYRIVSDKVNEMLKQDLINGTSTTVETVTDKKTGEITQRTKYGTKVMAQWWLEHGVNRGVTKRPVMTLVYGSKEFGFRDQVRSDTIQPAIDNGKGDMFLNPNQAAGYMAKLIWNAVSGTVVAAVEAMNWLKSAAKLLAAEVKDEKTDTVLRGRCAVHWVTPDGFPVWQEYKKPIQTRLNLMFLGQFRLQPTINTNKDSEIDARKQVSGIAPNFVHSLDGNHLRMTVVWAHEKYGIESFALIHDSFGTIPADAANLFKAVRETFVDTYESCDVLADFYDQIADQLHESQRDKMPALPAKGKLNLRDILKSDFAFA

SEQ ID NO: 1709 - DNA, 2670 bp, synthetic construct
  misc_feature 1..2670: note = Variant of RNA polymerase
  source 1..2670: mol_type = other DNA
atgcaccatcaccatcaccatatgaacacgattaacattgctaagaacgacttctctgacatcgaactggctgctatcccgttcaacactctggctgaccattacggtgagcgtttagctcgcgaacagttggcccttgagcatgagtcttacgagatgggtgaagcacgcttccgcaagatgtttgagcgtcaacttaaagctggtgaggttgcggataacgctgccgccaagcctctcatcactaccctactccctaagatgattgcacgcatcaacgactggtttgaggaagtgaaagctaagcgcggcaagcgcccgacagccttccagttcctgcaagaaatcaagccggaagccgtagcgtacatcaccattaagaccactctggcttgcctaaccggtgcggacaatacaaccgttcaggctgtagcaagcgcaatcggtcgggccattgaggacgaggctcgcttcggtcgtatccgtgaccttgaagctaagcacttcaagaagaacgttgaggaacaactcaacaagcgcgtagggcacgtctacaagaaagcatttatgcaagttgtcgagcacgacatgctctctaagggtctactcggtggcgaggcgtggtcttcgtggcataaggaagactctattcatgtaggagtacgctgcatcgagatgctcattgagtcaaccggaatggttagcttacaccgccaaaatgctggcgtagtgggtgcagactctgagactatcgaactcgcacctgaatacgctgaggctatcgcaacccgtgcaggtgcgctggctggcatctctccgatgttccaaccttgcgtagttcctcctaagccgtggactggcattactggtggtggctattgggctgcggggcgcaaacccctgcagttagtacgtactcgcagtctggcggcgcttcgccgctatgaagaagtgtcgatgccggaggtcatcaaagcagtcaacattgcgcagaatacagcatggcgtattaacaagaaagttctcgacgtagcgaataccatcacccaatggcagcactgtccagtcgcggatgtgcctgcgatggatcgtggcgaaatgccagctcgtccgttggacatcgataccaacgagattgcacttaaagcgtggaagaaagaagcttccgcgttctaccgcaaagacaaagcacgcatgagccgtcgtctgtcgatggagtttatgttatctcaggcgaacaagtttgcgaattatgaggcaatctggtttccgcaaaacatggattggcgtgggcgcgtgtacgctgtcccgatgttcaatcctcagggcaacgatatgacgaaaggcctgctgacctttgcgcaggagaaacccattggtgaagacggcttctattggctcaagattcatggcgcaaatacagctggagtggataaagtaccgtttccacaacgcatcaaatttgttgaggataaccatacgaatattatggaatgcgcgaaagcaccgctggaaaacacttggtgggcggaacaggactcgccgttctgctttctggcgttctgctttgagtatgctggcgtcatcaatagtggtctgtcgtacaactgtagcttgcctctggcatttgatggtagttgctccggcctgcaacatttctcagcgatgttacgcgacgaaattggcggcaaagctgtgaatctcctcccatctgcggaataccaggatatttatcgtatcgtcagcgacaaagttaacgagatgctgaaacaagatctgattaacggtacctctaccaccgtggaaacggtgactgataaaaagacaggcgaaattacccaacgcacgaaatacgggaccaaagttatggcacagtggtggttagaacacggtgtgaatcgtggcgtcacgaaacgcccggttatgactttggtgtatgggagcaaagagtttggattccgcgatcaagtgctgagtgacaccattcaaccggcgatcgataacggcaagggtgacatgtttctgaatccgaatcaggctgctggttacatggcgaaactgatctggaacgcagtgtccgggaccgtagtcgcagcagttgaggcgatgaactggctgaaaagtgcggcgaaattacttgctgctgaagtgaaggatgagaagacggatacagttctgcgtggccgctgcgcagtacattgggtgactcccgacggcttccctgtgtggcaggaatacaagaagcctattcaaacgcgcttgaacctgatgttcctcggtcagttccgcttacagcctaccattaacaccaacaaagatagcgagattgatgcacgcaaacaggtgtctggtatcgctcctaactttgtacacagcctggacggtaaccaccttcgtatgactgtagtgtgggcacacgagaagtacggaatcgaatcttttgcactgattcacgactccttcggtaccattccggctgacgctgcgaacctgttcaaagcagtgcgcgaaactttcgttgacacatatgagtcttgtgatgtactggctgatttctacgaccagattgctgaccagttgcacgagtctcaacgcgacaaaatgccagcacttccggctaaaggtaagttgaacctccgtgacatcttaaaatcggacttcgcgttcgcg

SEQ ID NO: 1710 - protein, 890 aa, synthetic construct
  REGION 1..890: note = Variant of RNA polymerase
MHHHHHHMNTINIAKNDFSDIELAAIPFNTLADHYGERLAREQLALEHESYEMGEARFRKMFERQLKAGEVADNAAAKPLITTLLPKMIARINDWFEEVKAKRGKRPTAFQFLQEIKPEAVAYITIKTTLACLTGADNTTVQAVASAIGRAIEDEARFGRIRDLEAKHFKKNVEEQLNKRVGHVYKKAFMQVVEHDMLSKGLLGGEAWSSWHKEDSIHVGVRCIEMLIESTGMVSLHRQNAGVVGADSETIELAPEYAEAIATRAGALAGISPMFQPCVVPPKPWTGITGGGYWAAGRKPLQLVRTRSLAALRRYEEVSMPEVIKAVNIAQNTAWRINKKVLDVANTITQWQHCPVADVPAMDRGEMPARPLDIDTNEIALKAWKKEASAFYRKDKARMSRRLSMEFMLSQANKFANYEAIWFPQNMDWRGRVYAVPMFNPQGNDMTKGLLTFAQEKPIGEDGFYWLKIHGANTAGVDKVPFPQRIKFVEDNHTNIMECAKAPLENTWWAEQDSPFCFLAFCFEYAGVINSGLSYNCSLPLAFDGSCSGLQHFSAMLRDEIGGKAVNLLPSAEYQDIYRIVSDKVNEMLKQDLINGTSTTVETVTDKKTGEITQRTKYGTKVMAQWWLEHGVNRGVTKRPVMTLVYGSKEFGFRDQVLSDTIQPAIDNGKGDMFLNPNQAAGYMAKLIWNAVSGTVVAAVEAMNWLKSAAKLLAAEVKDEKTDTVLRGRCAVHWVTPDGFPVWQEYKKPIQTRLNLMFLGQFRLQPTINTNKDSEIDARKQVSGIAPNFVHSLDGNHLRMTVVWAHEKYGIESFALIHDSFGTIPADAANLFKAVRETFVDTYESCDVLADFYDQIADQLHESQRDKMPALPAKGKLNLRDILKSDFAFA

SEQ ID NO: 1711 - DNA, 2670 bp, synthetic construct
  misc_feature 1..2670: note = Variant of RNA polymerase
  source 1..2670: mol_type = other DNA
atgcaccatcaccatcaccatatgaacacgattaacattgctaagaacgacttctctgacatcgaactggctgctatcccgttcaacactctggctgaccattacggtgagcgtttagctcgcgaacagttggcccttgagcatgagtcttacgagatgggtgaagcacgcttccgcaagatgtttgagcgtcaacttaaagctggtgaggttgcggataacgctgccgccaagcctctcatcactaccctactccctaagatgattgcacgcatcaacgactggtttgaggaagtgaaagctaagcgcggcaagcgcccgacagccttccagttcctgcaagaaatcaagccggaagccgtagcgtacatcaccattaagaccactctggcttgcctaaccagtgcggacaatacaaccgttcaggctgtagcaagcgcaatcggtcgggccattgaggacgaggctcgcttcggtcgtatccgtgaccttgaagctaagcacttcaagaagaacgttgaggaacaactcaacaagcgcgtagggcacgtctacaagaaagcatttatgcaagttgtcgagcacgacatgctctctaagggtctactcggtggcgaggcgtggtcttcgtggcataaggaagactctattcatgtaggagtacgctgcatcgagatgctcattgagtcaaccggaatggttagcttacaccgccaaaatgctggcgtagtgggtgcagactctgagactatcgaactcgcacctgaatacgctgaggctatcgcaacccgtgcaggtgcgctggctggcatctctccgatgttccaaccttgcgtagttcctcctaagccgtggactggcattactggtggtggctattgggctgcggggcgcaaacccctgcagttagtacgtactcgcagtctggcggcgcttcgccgctatgaagaagtgtcgatgccggaggtcatcaaagcagtcaacattgcgcagaatacagcatggcgtattaacaagaaagttctcgacgtagcgaataccatcacccaatggcagcactgtccagtcgcggatgtgcctgcgatggatcgtggcgaaatgccagctcgtccgttggacatcgataccaacgagattgcacttaaagcgtggaagaaagaagcttccgcgttctaccgcaaagacaaagcacgcatgagccgtcgtctgtcgatggagtttatgttatctcaggcgaacaagtttgcgaattatgaggcaatctggtttccgcaaaacatggattggcgtgggcgcgtgtacgctgtcccgatgttcaatcctcagggcaacgatatgacgaaaggcctgctgacctttgcgcaggagaaacccattggtgaagacggcttctattggctcaagattcatggcgcaaatacagctggagtggataaagtaccgtttccacaacgcatcaaatttgttgaggataaccatacgaatattatggaatgcgcgaaagcaccgctggaaaacacttggtgggcggaacaggactcgccgttctgctttctggcgttctgctttgagtatgctggcgtcatcaatagtggtctgtcgtacaactgtagcttgcctctggcatttgatggtagttgctccggcctgcaacatttctcagcgatgttacgcgacgaaattggcggcaaagctgtgaatctcctcccatctgcggaataccaggatatttatcgtatcgtcagcgacaaagttaacgagatgctgaaacaagatctgattaacggtacctctaccaccgtggaaacggtgactgataaaaagacaggcgaaattacccaacgcacgaaatacgggaccaaagttatggcacagtggtggttagaacacggtgtgaatcgtggcgtcacgaaacgcccggttatgactttggtgtatgggagcaaagagtttggattccgcgatcaagtgctgagtgacaccattcaaccggcgatcgatcggggcaagggtgacatgtttctgaatccgaatcaggctgctggttacatggcgaaactgatctggaacgcagtgtccgggaccgtagtcgcagcagttgaggcgatgaactggctgaaaagtgcggcgaaattacttgctgctgaagtgaaggatgagaagacggatacagttctgcgtggccgctgcgcagtacattgggtgactcccgacggcttccctgtgtggcaggaatacaagaagcctattcaaacgcgcttgaacctgatgttcctcggtcagttccgcttacagcctaccattaacaccaacaaagatagcgagattgatgcacgcaaacaggtgtctggtatcgctcctaactttgtacacagcctggacggtaaccaccttcgtatgactgtagtgtgggcacacgagaagtacggaatcgaatcttttgcactgattcacgactccttcggtaccattccggctgacgctgcgaacctgttcaaagcagtgcgcgaaactttcgttgacacatatgagtcttgtgatgtactggctgatttctacgaccagattgctgaccagttgcacgagtctcaacgcgacaaaatgccagcacttccggctaaaggtaagttgaacctccgtgacatcttaaaatcggacttcgcgttcgcg

SEQ ID NO: 1712 - protein, 890 aa, synthetic construct
  REGION 1..890: note = Variant of RNA polymerase
MHHHHHHMNTINIAKNDFSDIELAAIPFNTLADHYGERLAREQLALEHESYEMGEARFRKMFERQLKAGEVADNAAAKPLITTLLPKMIARINDWFEEVKAKRGKRPTAFQFLQEIKPEAVAYITIKTTLACLTSADNTTVQAVASAIGRAIEDEARFGRIRDLEAKHFKKNVEEQLNKRVGHVYKKAFMQVVEHDMLSKGLLGGEAWSSWHKEDSIHVGVRCIEMLIESTGMVSLHRQNAGVVGADSETIELAPEYAEAIATRAGALAGISPMFQPCVVPPKPWTGITGGGYWAAGRKPLQLVRTRSLAALRRYEEVSMPEVIKAVNIAQNTAWRINKKVLDVANTITQWQHCPVADVPAMDRGEMPARPLDIDTNEIALKAWKKEASAFYRKDKARMSRRLSMEFMLSQANKFANYEAIWFPQNMDWRGRVYAVPMFNPQGNDMTKGLLTFAQEKPIGEDGFYWLKIHGANTAGVDKVPFPQRIKFVEDNHTNIMECAKAPLENTWWAEQDSPFCFLAFCFEYAGVINSGLSYNCSLPLAFDGSCSGLQHFSAMLRDEIGGKAVNLLPSAEYQDIYRIVSDKVNEMLKQDLINGTSTTVETVTDKKTGEITQRTKYGTKVMAQWWLEHGVNRGVTKRPVMTLVYGSKEFGFRDQVLSDTIQPAIDRGKGDMFLNPNQAAGYMAKLIWNAVSGTVVAAVEAMNWLKSAAKLLAAEVKDEKTDTVLRGRCAVHWVTPDGFPVWQEYKKPIQTRLNLMFLGQFRLQPTINTNKDSEIDARKQVSGIAPNFVHSLDGNHLRMTVVWAHEKYGIESFALIHDSFGTIPADAANLFKAVRETFVDTYESCDVLADFYDQIADQLHESQRDKMPALPAKGKLNLRDILKSDFAFA

SEQ ID NO: 1713 - DNA, 2670 bp, synthetic construct
  misc_feature 1..2670: note = Variant of RNA polymerase
  source 1..2670: mol_type = other DNA
atgcaccatcaccatcaccatatgaacacgattaacattgctaagaacgacttctctgacatcgaactggctgctatcccgttcaacactctggctgaccattacggtgagcgtttagctcgcgaacagttggcccttgagcatgagtcttacgagatgggtgaagcacgcttccgcaagatgtttgagcgtcaacttaaagctggtgaggttgcggataacgctgccgccaagcctctcatcactaccctactccctaagatgattgcacgcatcaacgactggtttgaggaagtgaaagctaagcgcggcaagcgcccgacagccttccagttcctgcaagaaatcaagccggaagccgtagcgtacatcaccattaagaccactctggcttgcctaaccagtgcggacaatacaaccgttcaggctgtagcaagcgcaatcggtcgggccattgaggacgaggctcgcttcggtcgtatccgtgaccttgaagctaagcacttcaagaagaacgttgaggaacaactcaacaagcgcgtagggcacgtctacaagaaagcatttatgcaagttgtcgagcacgacatgctctctaagggtctactcggtggcgaggcgtggtcttcgtggcataaggaagactctattcatgtaggagtacgctgcatcgagatgctcattgagtcaaccggaatggttagcttacaccgccaaaatgctggcgtagtgggtgcagactctgagactatcgaactcgcacctgaatacgctgaggctatcgcaacccgtgcaggtgcgctggctggcatctctccgatgttccaaccttgcgtagttcctcctaagccgtggactggcattactggtggtggctattgggctgcggggcgcaaacccctgcagttagtacgtactcgcagtctggcgggtcttcgccgctatgaagaagtgtcgatgccggaggtcatcaaagcagtcaacattgcgcagaatacagcatggcgtattaacaagaaagttctcgacgtagcgaataccatcacccaatggcagcactgtccagtcgcggatgtgcctgcgatggatcgtggcgaaatgccagctcgtccgttggacatcgataccaacgagattgcacttaaagcgtggaagaaagaagcttccgcgttctaccgcaaagacaaagcacgcatgagccgtcgtctgtcgatggagtttatgttatctcaggcgaacaagtttgcgaattatgaggcaatctggtttccgcaaaacatggattggcgtgggcgcgtgtacgctgtcccgatgttcaatcctcagggcaacgatatgacgaaaggcctgctgacctttgcgcaggagaaacccattggtgaagacggcttctattggctcaagattcatggcgcaaatacagctggagtggataaagtaccgtttccacaacgcatcaaatttgttgaggataaccatacgaatattatggaatgcgcgaaagcaccgctggaaaacacttggtgggcggaacaggactcgccgttctgctttctggcgttctgctttgagtatgctggcgtcatcaatagtggtctgtcgtacaactgtagcttgcctctggcatttgatggtagttgctccggcctgcaacatttctcagcgatgttacgcgacgaaattggcggcaaagctgtgaatctcctcccatctgcggaataccaggatatttatcgtatcgtcagcgacaaagttaacgagatgctgaaacaagatctgattaacggtacctctaccaccgtggaaacggtgactgataaaaagacaggcgaaattacccaacgcacgaaatacgggaccaaagttatggcacagtggtggttagaacacggtgtgaatcgtggcgtcacgaaacgcccggttatgactttggtgtatgggagcaaagagtttggattccgcgatcaagtgctgagtgacaccattcaaccggcgatcgataacggcaagggtgacatgtttctgaatccgaatcaggctgctggttacatggcgaaactgatctggaacgcagtgtccgggaccgtagtcgcagcagttgaggcgatgaactggctgaaaagtgcggcgaaattacttgctgctgaagtgaaggatgagaagacggatacagttctgcgtggccgctgcgcagtacattgggtgactcccgacggcttccctgtgtggcaggaatacaagaagcctattcaaacgcgcttgaacctgatgttcctcggtcagttccgcttacagcctaccattaacaccaacaaagatagcgagattgatgcacgcaaacaggtgtctggtatcgctcctaactttgtacacagcctggacggtaaccaccttcgtatgactgtagtgtgggcacacgagaagtacggaatcgaatcttttgcactgattcacgactccttcggtaccattccggctgacgctgcgaacctgttcaaagcagtgcgcgaaactttcgttgacacatatgagtcttgtgatgtactggctgatttctacgaccagattgctgaccagttgcacgagtctcaacgcgacaaaatgccagcacttccggctaaaggtaagttgaacctccgtgacatcttaaaatcggacttcgcgttcgcg

SEQ ID NO: 1714 - protein, 890 aa, synthetic construct
  REGION 1..890: note = Variant of RNA polymerase
MHHHHHHMNTINIAKNDFSDIELAAIPFNTLADHYGERLAREQLALEHESYEMGEARFRKMFERQLKAGEVADNAAAKPLITTLLPKMIARINDWFEEVKAKRGKRPTAFQFLQEIKPEAVAYITIKTTLACLTSADNTTVQAVASAIGRAIEDEARFGRIRDLEAKHFKKNVEEQLNKRVGHVYKKAFMQVVEHDMLSKGLLGGEAWSSWHKEDSIHVGVRCIEMLIESTGMVSLHRQNAGVVGADSETIELAPEYAEAIATRAGALAGISPMFQPCVVPPKPWTGITGGGYWAAGRKPLQLVRTRSLAGLRRYEEVSMPEVIKAVNIAQNTAWRINKKVLDVANTITQWQHCPVADVPAMDRGEMPARPLDIDTNEIALKAWKKEASAFYRKDKARMSRRLSMEFMLSQANKFANYEAIWFPQNMDWRGRVYAVPMFNPQGNDMTKGLLTFAQEKPIGEDGFYWLKIHGANTAGVDKVPFPQRIKFVEDNHTNIMECAKAPLENTWWAEQDSPFCFLAFCFEYAGVINSGLSYNCSLPLAFDGSCSGLQHFSAMLRDEIGGKAVNLLPSAEYQDIYRIVSDKVNEMLKQDLINGTSTTVETVTDKKTGEITQRTKYGTKVMAQWWLEHGVNRGVTKRPVMTLVYGSKEFGFRDQVLSDTIQPAIDNGKGDMFLNPNQAAGYMAKLIWNAVSGTVVAAVEAMNWLKSAAKLLAAEVKDEKTDTVLRGRCAVHWVTPDGFPVWQEYKKPIQTRLNLMFLGQFRLQPTINTNKDSEIDARKQVSGIAPNFVHSLDGNHLRMTVVWAHEKYGIESFALIHDSFGTIPADAANLFKAVRETFVDTYESCDVLADFYDQIADQLHESQRDKMPALPAKGKLNLRDILKSDFAFA

SEQ ID NO: 1715 - DNA, 2670 bp, synthetic construct
  misc_feature 1..2670: note = Variant of RNA polymerase
  source 1..2670: mol_type = other DNA
atgcaccatcaccatcaccatatgaacacgattaacattgctaagaacgacttctctgacatcgaactggctgctatcccgttcaacactctggctgaccattacggtgagcgtttagctcgcgaacagttggcccttgagcatgagtcttacgagatgggtgaagcacgcttccgcaagatgtttgagcgtcaacttaaagctggtgaggttgcggataacgctgccgccaagcctctcatcactaccctactccctaagatgattgcacgcatcaacgactggtttgaggaagtgaaagctaagcgcggcaagcgcccgaaggccttccagttcctgcaagaaatcaagccggaagccgtagcgtacatcaccattaagaccactctggcttgcctaaccagtgcggacaatacaaccgttcaggctgtagcaagcgcaatcggtcgggccattgaggacgaggctcgcttcggtcgtatccgtgaccttgaagctaagcacttcaagaagaacgttgaggaacaactcaacaagcgcgtagggcacgtctacaagaaagcatttatgcaagttgtcgagcacgacatgctctctaagggtctactcggtggcgaggcgtggtcttcgtggcataaggaagactctattcatgtaggagtacgctgcatcgagatgctcattgagtcaaccggaatggttagcttacaccgccaaaatgctggcgtagtgggtgcagactctgagactatcgaactcgcacctgaatacgctgaggctatcgcaacccgtgcaggtgcgctggctggcatctctccgatgttccaaccttgcgtagttcctcctaagccgtggactggcattactggtggtggctattgggctgcggggcgcaaacccctgcagttagtacgtactcgcagtctggcggcgcttcgccgctatgaagaagtgtcgatgccggaggtcatcaaagcagtcaacattgcgcagaatacagcatggcgtattaacaagaaagttctcgacgtagcgaataccatcacccaatggcagcactgtccagtcgcggatgtgcctgcgatggatcgtggcgaaatgccagctcgtccgttggacatcgataccaacgagattgcacttaaagcgtggaagaaagaagcttccgcgttctaccgcaaagacaaagcacgcatgagccgtcgtctgtcgatggagtttatgttatctcaggcgaacaagtttgcgaattatgaggcaatctggtttccgcaaaacatggattggcgtgggcgcgtgtacgctgtcccgatgttcaatcctcagggcaacgatatgacgaaaggcctgctgacctttgcgcaggagaaacccattggtgaagacggcttctattggctcaagattcatggcgcaaatacagctggagtggataaagtaccgtttccacaacgcatcaaatttgttgaggataaccatacgaatattatggaatgcgcgaaagcaccgctggaaaacacttggtgggcggaacaggactcgccgttctgctttctggcgttctgctttgagtatgctggcgtcatcaatagtggtctgtcgtacaactgtagcttgcctctggcatttgatggtagttgctccggcctgcaacatttctcagcgatgttacgcgacgaaattggcggcaaagctgtgaatctcctcccatctgcggaataccaggatatttatcgtatcgtcagcgacaaagttaacgagatgctgaaacaagatctgattaacggtacctctaccaccgtggaaacggtgactgataaaaagacaggcgaaattacccaacgcacgaaatacgggaccaaagttatggcacagtggtggttagaacacggtgtgaatcgtggcgtcacgaaacgcccggttatgactttggtgtatgggagcaaagagtttggattccgcgatcaagtgctgagtgacaccattcaaccggcgatcgataacggcaagggtgacatgtttctgaatccgaatcaggctgctggttacatggcgaaactgatctggaacgcagtgtccgggaccgtagtcgcagcagttgaggcgatgaactggctgaaaagtgcggcgaaattacttgctgctgaagtgaaggatgagaagacggatacagttctgcgtggccgctgcgcagtacattgggtgactcccgacggcttccctgtgtggcaggaatacaagaagcctattcaaacgcgcttgaacctgatgttcctcggtcagttccgcttacagcctaccattaacaccaacaaagatagcgagattgatgcacgcaaacaggtgtctggtatcgctcctaactttgtacacagcctggacggtaaccaccttcgtatgactgtagtgtgggcacacgagaagtacggaatcgaatcttttgcactgattcacgactccttcggtaccattccggctgacgctgcgaacctgttcaaagcagtgcgcgaaactttcgttgacacatatgagtcttgtgatgtactggctgatttctacgaccagattgctgaccagttgcacgagtctcaacgcgacaaaatgccagcacttccggctaaaggtaagttgaacctccgtgacatcttaaaatcggacttcgcgttcgcg

SEQ ID NO: 1716 - protein, 890 aa, synthetic construct
  REGION 1..890: note = Variant of RNA polymerase
MHHHHHHMNTINIAKNDFSDIELAAIPFNTLADHYGERLAREQLALEHESYEMGEARFRKMFERQLKAGEVADNAAAKPLITTLLPKMIARINDWFEEVKAKRGKRPKAFQFLQEIKPEAVAYITIKTTLACLTSADNTTVQAVASAIGRAIEDEARFGRIRDLEAKHFKKNVEEQLNKRVGHVYKKAFMQVVEHDMLSKGLLGGEAWSSWHKEDSIHVGVRCIEMLIESTGMVSLHRQNAGVVGADSETIELAPEYAEAIATRAGALAGISPMFQPCVVPPKPWTGITGGGYWAAGRKPLQLVRTRSLAALRRYEEVSMPEVIKAVNIAQNTAWRINKKVLDVANTITQWQHCPVADVPAMDRGEMPARPLDIDTNEIALKAWKKEASAFYRKDKARMSRRLSMEFMLSQANKFANYEAIWFPQNMDWRGRVYAVPMFNPQGNDMTKGLLTFAQEKPIGEDGFYWLKIHGANTAGVDKVPFPQRIKFVEDNHTNIMECAKAPLENTWWAEQDSPFCFLAFCFEYAGVINSGLSYNCSLPLAFDGSCSGLQHFSAMLRDEIGGKAVNLLPSAEYQDIYRIVSDKVNEMLKQDLINGTSTTVETVTDKKTGEITQRTKYGTKVMAQWWLEHGVNRGVTKRPVMTLVYGSKEFGFRDQVLSDTIQPAIDNGKGDMFLNPNQAAGYMAKLIWNAVSGTVVAAVEAMNWLKSAAKLLAAEVKDEKTDTVLRGRCAVHWVTPDGFPVWQEYKKPIQTRLNLMFLGQFRLQPTINTNKDSEIDARKQVSGIAPNFVHSLDGNHLRMTVVWAHEKYGIESFALIHDSFGTIPADAANLFKAVRETFVDTYESCDVLADFYDQIADQLHESQRDKMPALPAKGKLNLRDILKSDFAFA

SEQ ID NO: 1717 - DNA, 2670 bp, synthetic construct
  misc_feature 1..2670: note = Variant of RNA polymerase
  source 1..2670: mol_type = other DNA
atgcaccatcaccatcaccatatgaacacgattaacattgctaagaacgacttctctgacatcgaactggctgctatcccgttcaacactctggctgaccattacggtgagcgtttagctcgcgaacagttggcccttgagcatgagtcttacgagatgggtgaagcacgcttccgcaagatgtttgagcgtcaacttaaagctggtgaggttgcggataacgctgccgccaagcctctcatcactaccctactccctaagatgattgcacgcatcaacgactggtttgaggaagtgaaagctaagcgcggcaagcgcccgacagccttccagttcctgcaagaaatcaagccggaagccgtagcgtacatcaccattaagaccactctggcttgcctaaccagtgcggacaatacaaccgttcaggctgtaggtagcgcaatcggtcgggccattgaggacgaggctcgcttcggtcgtatccgtgaccttgaagctaagcacttcaagaagaacgttgaggaacaactcaacaagcgcgtagggcacgtctacaagaaagcatttatgcaagttgtcgagcacgacatgctctctaagggtctactcggtggcgaggcgtggtcttcgtggcataaggaagactctattcatgtaggagtacgctgcatcgagatgctcattgagtcaaccggaatggttagcttacaccgccaaaatgctggcgtagtgggtgcagactctgagactatcgaactcgcacctgaatacgctgaggctatcgcaacccgtgcaggtgcgctggctggcatctctccgatgttccaaccttgcgtagttcctcctaagccgtggactggcattactggtggtggctattgggctgcggggcgcaaacccctgcagttagtacgtactcgcagtctggcggcgcttcgccgctatgaagaagtgtcgatgccggaggtcatcaaagcagtcaacattgcgcagaatacagcatggcgtattaacaagaaagttctcgacgtagcgaataccatcacccaatggcagcactgtccagtcgcggatgtgcctgcgatggatcgtggcgaaatgccagctcgtccgttggacatcgataccaacgagattgcacttaaagcgtggaagaaagaagcttccgcgttctaccgcaaagacaaagcacgcatgagccgtcgtctgtcgatggagtttatgttatctcaggcgaacaagtttgcgaattatgaggcaatctggtttccgcaaaacatggattggcgtgggcgcgtgtacgctgtcccgatgttcaatcctcagggcaacgatatgacgaaaggcctgctgacctttgcgcaggagaaacccattggtgaagacggcttctattggctcaagattcatggcgcaaatacagctggagtggataaagtaccgtttccacaacgcatcaaatttgttgaggataaccatacgaatattatggaatgcgcgaaagcaccgctggaaaacacttggtgggcggaacaggactcgccgttctgctttctggcgttctgctttgagtatgctggcgtcatcaatagtggtctgtcgtacaactgtagcttgcctctggcatttgatggtagttgctccggcctgcaacatttctcagcgatgttacgcgacgaaattggcggcaaagctgtgaatctcctcccatctgcggaataccaggatatttatcgtatcgtcagcgacaaagttaacgagatgctgaaacaagatctgattaacggtacctctaccaccgtggaaacggtgactgataaaaagacaggcgaaattacccaacgcacgaaatacgggaccaaagttatggcacagtggtggttagaacacggtgtgaatcgtggcgtcacgaaacgcccggttatgactttggtgtatgggagcaaagagtttggattccgcgatcaagtgctgagtgacaccattcaaccggcgatcgataacggcaagggtgacatgtttctgaatccgaatcaggctgctggttacatggcgaaactgatctggaacgcagtgtccgggaccgtagtcgcagcagttgaggcgatgaactggctgaaaagtgcggcgaaattacttgctgctgaagtgaaggatgagaagacggatacagttctgcgtggccgctgcgcagtacattgggtgactcccgacggcttccctgtgtggcaggaatacaagaagcctattcaaacgcgcttgaacctgatgttcctcggtcagttccgcttacagcctaccattaacaccaacaaagatagcgagattgatgcacgcaaacaggtgtctggtatcgctcctaactttgtacacagcctggacggtaaccaccttcgtatgactgtagtgtgggcacacgagaagtacggaatcgaatcttttgcactgattcacgactccttcggtaccattccggctgacgctgcgaacctgttcaaagcagtgcgcgaaactttcgttgacacatatgagtcttgtgatgtactggctgatttctacgaccagattgctgaccagttgcacgagtctcaacgcgacaaaatgccagcacttccggctaaaggtaagttgaacctccgtgacatcttaaaatcggacttcgcgttcgcg

SEQ ID NO: 1718 - protein, 890 aa, synthetic construct
  REGION 1..890: note = Variant of RNA polymerase
MHHHHHHMNTINIAKNDFSDIELAAIPFNTLADHYGERLAREQLALEHESYEMGEARFRKMFERQLKAGEVADNAAAKPLITTLLPKMIARINDWFEEVKAKRGKRPTAFQFLQEIKPEAVAYITIKTTLACLTSADNTTVQAVGSAIGRAIEDEARFGRIRDLEAKHFKKNVEEQLNKRVGHVYKKAFMQVVEHDMLSKGLLGGEAWSSWHKEDSIHVGVRCIEMLIESTGMVSLHRQNAGVVGADSETIELAPEYAEAIATRAGALAGISPMFQPCVVPPKPWTGITGGGYWAAGRKPLQLVRTRSLAALRRYEEVSMPEVIKAVNIAQNTAWRINKKVLDVANTITQWQHCPVADVPAMDRGEMPARPLDIDTNEIALKAWKKEASAFYRKDKARMSRRLSMEFMLSQANKFANYEAIWFPQNMDWRGRVYAVPMFNPQGNDMTKGLLTFAQEKPIGEDGFYWLKIHGANTAGVDKVPFPQRIKFVEDNHTNIMECAKAPLENTWWAEQDSPFCFLAFCFEYAGVINSGLSYNCSLPLAFDGSCSGLQHFSAMLRDEIGGKAVNLLPSAEYQDIYRIVSDKVNEMLKQDLINGTSTTVETVTDKKTGEITQRTKYGTKVMAQWWLEHGVNRGVTKRPVMTLVYGSKEFGFRDQVLSDTIQPAIDNGKGDMFLNPNQAAGYMAKLIWNAVSGTVVAAVEAMNWLKSAAKLLAAEVKDEKTDTVLRGRCAVHWVTPDGFPVWQEYKKPIQTRLNLMFLGQFRLQPTINTNKDSEIDARKQVSGIAPNFVHSLDGNHLRMTVVWAHEKYGIESFALIHDSFGTIPADAANLFKAVRETFVDTYESCDVLADFYDQIADQLHESQRDKMPALPAKGKLNLRDILKSDFAFA

SEQ ID NO: 1719 - DNA, 2670 bp, synthetic construct
  misc_feature 1..2670: note = Variant of RNA polymerase
  source 1..2670: mol_type = other DNA
atgcaccatcaccatcaccatatgaacacgattaacattgctaagaacgacttctctgacatcgaactggctgctatcccgttcaacactctggctgaccattacggtgagcgtttagctcgcgaacagttggcccttgagcatgagtcttacgagatgggtgaagcacgcttccgcaagatgtttgagcgtcaacttaaagctggtgaggttgcggataacgctgccgccaagcctctcatcactaccctactccctaagatgattgcacgcatcaacgactggtttgaggaagtgaaagctaagcgcggcaagcgcccgacagccttccagttcctgcaagaaatcaagccggaagccgtagcgtacatcaccattaagaccactctggcttgcctaaccagtgcggacaatacaaccgttcaggctgtagcaagcgcaatcggtcgggccattgaggacgaggctcgcttcggtcgtatccgtgaccttgaagctaagcacttcaagaagaacgttgaggaacaactcaacaagcgcgtagggcacgtctacaagaaagcatttatgcaagttgtcgagcacgacatgctctctaagggtctactcggtggcgaggcgtggtcttcgtggcataaggaagactctattcatgtaggagtacgctgcatcgagatgctcattgagtcaaccggaatggttagcttacaccgccaaaatgctggcgtagtgggtgcagactctgagactatcgaactcgcacctgaatacgctgaggctatcgcaacccgtgcaggtgcgctggctggcatctctccgatgttccaaccttgcgtagttcctcctaagccgtggactggcattactggtggtggctattgggctgcggggcgcaaacccctgcagttagtacgtactcgcagtcgggcggcgcttcgccgctatgaagaagtgtcgatgccggaggtcatcaaagcagtcaacattgcgcagaatacagcatggcgtattaacaagaaagttctcgacgtagcgaataccatcacccaatggcagcactgtccagtcgcggatgtgcctgcgatggatcgtggcgaaatgccagctcgtccgttggacatcgataccaacgagattgcacttaaagcgtggaagaaagaagcttccgcgttctaccgcaaagacaaagcacgcatgagccgtcgtctgtcgatggagtttatgttatctcaggcgaacaagtttgcgaattatgaggcaatctggtttccgcaaaacatggattggcgtgggcgcgtgtacgctgtcccgatgttcaatcctcagggcaacgatatgacgaaaggcctgctgacctttgcgcaggagaaacccattggtgaagacggcttctattggctcaagattcatggcgcaaatacagctggagtggataaagtaccgtttccacaacgcatcaaatttgttgaggataaccatacgaatattatggaatgcgcgaaagcaccgctggaaaacacttggtgggcggaacaggactcgccgttctgctttctggcgttctgctttgagtatgctggcgtcatcaatagtggtctgtcgtacaactgtagcttgcctctggcatttgatggtagttgctccggcctgcaacatttctcagcgatgttacgcgacgaaattggcggcaaagctgtgaatctcctcccatctgcggaataccaggatatttatcgtatcgtcagcgacaaagttaacgagatgctgaaacaagatctgattaacggtacctctaccaccgtggaaacggtgactgataaaaagacaggcgaaattacccaacgcacgaaatacgggaccaaagttatggcacagtggtggttagaacacggtgtgaatcgtggcgtcacgaaacgcccggttatgactttggtgtatgggagcaaagagtttggattccgcgatcaagtgctgagtgacaccattcaaccggcgatcgataacggcaagggtgacatgtttctgaatccgaatcaggctgctggttacatggcgaaactgatctggaacgcagtgtccgggaccgtagtcgcagcagttgaggcgatgaactggctgaaaagtgcggcgaaattacttgctgctgaagtgaaggatgagaagacggatacagttctgcgtggccgctgcgcagtacattgggtgactcccgacggcttccctgtgtggcaggaatacaagaagcctattcaaacgcgcttgaacctgatgttcctcggtcagttccgcttacagcctaccattaacaccaacaaagatagcgagattgatgcacgcaaacaggtgtctggtatcgctcctaactttgtacacagcctggacggtaaccaccttcgtatgactgtagtgtgggcacacgagaagtacggaatcgaatcttttgcactgattcacgactccttcggtaccattccggctgacgctgcgaacctgttcaaagcagtgcgcgaaactttcgttgacacatatgagtcttgtgatgtactggctgatttctacgaccagattgctgaccagttgcacgagtctcaacgcgacaaaatgccagcacttccggctaaaggtaagttgaacctccgtgacatcttaaaatcggacttcgcgttcgcg

SEQ ID NO: 1720 - protein, 890 aa, synthetic construct
  REGION 1..890: note = Variant of RNA polymerase
MHHHHHHMNTINIAKNDFSDIELAAIPFNTLADHYGERLAREQLALEHESYEMGEARFRKMFERQLKAGEVADNAAAKPLITTLLPKMIARINDWFEEVKAKRGKRPTAFQFLQEIKPEAVAYITIKTTLACLTSADNTTVQAVASAIGRAIEDEARFGRIRDLEAKHFKKNVEEQLNKRVGHVYKKAFMQVVEHDMLSKGLLGGEAWSSWHKEDSIHVGVRCIEMLIESTGMVSLHRQNAGVVGADSETIELAPEYAEAIATRAGALAGISPMFQPCVVPPKPWTGITGGGYWAAGRKPLQLVRTRSRAALRRYEEVSMPEVIKAVNIAQNTAWRINKKVLDVANTITQWQHCPVADVPAMDRGEMPARPLDIDTNEIALKAWKKEASAFYRKDKARMSRRLSMEFMLSQANKFANYEAIWFPQNMDWRGRVYAVPMFNPQGNDMTKGLLTFAQEKPIGEDGFYWLKIHGANTAGVDKVPFPQRIKFVEDNHTNIMECAKAPLENTWWAEQDSPFCFLAFCFEYAGVINSGLSYNCSLPLAFDGSCSGLQHFSAMLRDEIGGKAVNLLPSAEYQDIYRIVSDKVNEMLKQDLINGTSTTVETVTDKKTGEITQRTKYGTKVMAQWWLEHGVNRGVTKRPVMTLVYGSKEFGFRDQVLSDTIQPAIDNGKGDMFLNPNQAAGYMAKLIWNAVSGTVVAAVEAMNWLKSAAKLLAAEVKDEKTDTVLRGRCAVHWVTPDGFPVWQEYKKPIQTRLNLMFLGQFRLQPTINTNKDSEIDARKQVSGIAPNFVHSLDGNHLRMTVVWAHEKYGIESFALIHDSFGTIPADAANLFKAVRETFVDTYESCDVLADFYDQIADQLHESQRDKMPALPAKGKLNLRDILKSDFAFA

SEQ ID NO: 1721 - DNA, 2670 bp, synthetic construct
  misc_feature 1..2670: note = Variant of RNA polymerase
  source 1..2670: mol_type = other DNA
atgcaccatcaccatcaccatatgaacacgattaacattgctaagaacgacttctctgacatcgaactggctgctatcccgttcaacactctggctgaccattacggtgagcgtttagctcgcgaacagttggcccttgagcatgagtcttacgagatgggtgaagcacgcttccgcaagatgtttgagcgtcaacttaaagctggtgaggttgcggataacgctgccgccaagcctctcatcactaccctactccctaagatgattgcacgcatcaacgactggtttgaggaagtgaaagctaagcgcggcaagcgcccgacagccttccagttcctgcaagaaatcaagccggaagccgtagcgtacatcaccatgaagaccactctggcttgcctaaccagtgcggacaatacaaccgttcaggctgtagcaagcgcaatcggtcgggccattgaggacgaggctcgcttcggtcgtatccgtgaccttgaagctaagcacttcaagaagaacgttgaggaacaactcaacaagcgcgtagggcacgtctacaagaaagcatttatgcaagttgtcgagcacgacatgctctctaagggtctactcggtggcgaggcgtggtcttcgtggcataaggaagactctattcatgtaggagtacgctgcatcgagatgctcattgagtcaaccggaatggttagcttacaccgccaaaatgctggcgtagtgggtgcagactctgagactatcgaactcgcacctgaatacgctgaggctatcgcaacccgtgcaggtgcgctggctggcatctctccgatgttccaaccttgcgtagttcctcctaagccgtggactggcattactggtggtggctattgggctgcggggcgcaaacccctgcagttagtacgtactcgcagtctggcggcgcttcgccgctatgaagaagtgtcgatgccggaggtcatcaaagcagtcaacattgcgcagaatacagcatggcgtattaacaagaaagttctcgacgtagcgaataccatcacccaatggcagcactgtccagtcgcggatgtgcctgcgatggatcgtggcgaaatgccagctcgtccgttggacatcgataccaacgagattgcacttaaagcgtggaagaaagaagcttccgcgttctaccgcaaagacaaagcacgcatgagccgtcgtctgtcgatggagtttatgttatctcaggcgaacaagtttgcgaattatgaggcaatctggtttccgcaaaacatggattggcgtgggcgcgtgtacgctgtcccgatgttcaatcctcagggcaacgatatgacgaaaggcctgctgacctttgcgcaggagaaacccattggtgaagacggcttctattggctcaagattcatggcgcaaatacagctggagtggataaagtaccgtttccacaacgcatcaaatttgttgaggataaccatacgaatattatggaatgcgcgaaagcaccgctggaaaacacttggtgggcggaacaggactcgccgttctgctttctggcgttctgctttgagtatgctggcgtcatcaatagtggtctgtcgtacaactgtagcttgcctctggcatttgatggtagttgctccggcctgcaacatttctcagcgatgttacgcgacgaaattggcggcaaagctgtgaatctcctcccatctgcggaataccaggatatttatcgtatcgtcagcgacaaagttaacgagatgctgaaacaagatctgattaacggtacctctaccaccgtggaaacggtgactgataaaaagacaggcgaaattacccaacgcacgaaatacgggaccaaagttatggcacagtggtggttagaacacggtgtgaatcgtggcgtcacgaaacgcccggttatgactttggtgtatgggagcaaagagtttggattccgcgatcaagtgctgagtgacaccattcaaccggcgatcgataacggcaagggtgacatgtttctgaatccgaatcaggctgctggttacatggcgaaactgatctggaacgcagtgtccgggaccgtagtcgcagcagttgaggcgatgaactggctgaaaagtgcggcgaaattacttgctgctgaagtgaaggatgagaagacggatacagttctgcgtggccgctgcgcagtacattgggtgactcccgacggcttccctgtgtggcaggaatacaagaagcctattcaaacgcgcttgaacctgatgttcctcggtcagttccgcttacagcctaccattaacaccaacaaagatagcgagattgatgcacgcaaacaggtgtctggtatcgctcctaactttgtacacagcctggacggtaaccaccttcgtatgactgtagtgtgggcacacgagaagtacggaatcgaatcttttgcactgattcacgactccttcggtaccattccggctgacgctgcgaacctgttcaaagcagtgcgcgaaactttcgttgacacatatgagtcttgtgatgtactggctgatttctacgaccagattgctgaccagttgcacgagtctcaacgcgacaaaatgccagcacttccggctaaaggtaagttgaacctccgtgacatcttaaaatcggacttcgcgttcgcg

SEQ ID NO: 1722 - protein, 890 aa, synthetic construct
  REGION 1..890: note = Variant of RNA polymerase
MHHHHHHMNTINIAKNDFSDIELAAIPFNTLADHYGERLAREQLALEHESYEMGEARFRKMFERQLKAGEVADNAAAKPLITTLLPKMIARINDWFEEVKAKRGKRPTAFQFLQEIKPEAVAYITMKTTLACLTSADNTTVQAVASAIGRAIEDEARFGRIRDLEAKHFKKNVEEQLNKRVGHVYKKAFMQVVEHDMLSKGLLGGEAWSSWHKEDSIHVGVRCIEMLIESTGMVSLHRQNAGVVGADSETIELAPEYAEAIATRAGALAGISPMFQPCVVPPKPWTGITGGGYWAAGRKPLQLVRTRSLAALRRYEEVSMPEVIKAVNIAQNTAWRINKKVLDVANTITQWQHCPVADVPAMDRGEMPARPLDIDTNEIALKAWKKEASAFYRKDKARMSRRLSMEFMLSQANKFANYEAIWFPQNMDWRGRVYAVPMFNPQGNDMTKGLLTFAQEKPIGEDGFYWLKIHGANTAGVDKVPFPQRIKFVEDNHTNIMECAKAPLENTWWAEQDSPFCFLAFCFEYAGVINSGLSYNCSLPLAFDGSCSGLQHFSAMLRDEIGGKAVNLLPSAEYQDIYRIVSDKVNEMLKQDLINGTSTTVETVTDKKTGEITQRTKYGTKVMAQWWLEHGVNRGVTKRPVMTLVYGSKEFGFRDQVLSDTIQPAIDNGKGDMFLNPNQAAGYMAKLIWNAVSGTVVAAVEAMNWLKSAAKLLAAEVKDEKTDTVLRGRCAVHWVTPDGFPVWQEYKKPIQTRLNLMFLGQFRLQPTINTNKDSEIDARKQVSGIAPNFVHSLDGNHLRMTVVWAHEKYGIESFALIHDSFGTIPADAANLFKAVRETFVDTYESCDVLADFYDQIADQLHESQRDKMPALPAKGKLNLRDILKSDFAFA

SEQ ID NO: 1723 - DNA, 2670 bp, synthetic construct
  misc_feature 1..2670: note = Variant of RNA polymerase
  source 1..2670: mol_type = other DNA
atgcaccatcaccatcaccatatgaacacgattaacattgctaagaacgacttctctgacatcgaactggctgctatcccgttcaacactctggctgaccattacggtgagcgtttagctcgcgaacagttggcccttgagcatgagtcttacgagatgggtgaagcacgcttccgcaagatgtttgagcgtcaacttaaagctggtgaggttgcggataacgctgccgccaagcctctcatcactaccctactccctaagatgattgcacgcatcaacgactggtttgaggctgtgaaagctaagcgcggcaagcgcccgacagccttccagttcctgcaagaaatcaagccggaagccgtagcgtacatcaccattaagaccactctggcttgcctaaccagtgcggacaatacaaccgttcaggctgtagcaagcgcaatcggtcgggccattgaggacgaggctcgcttcggtcgtatccgtgaccttgaagctaagcacttcaagaagaacgttgaggaacaactcaacaagcgcgtagggcacgtctacaagaaagcatttatgcaagttgtcgagcacgacatgctctctaagggtctactcggtggcgaggcgtggtcttcgtggcataaggaagactctattcatgtaggagtacgctgcatcgagatgctcattgagtcaaccggaatggttagcttacaccgccaaaatgctggcgtagtgggtgcagactctgagactatcgaactcgcacctgaatacgctgaggctatcgcaacccgtgcaggtgcgctggctggcatctctccgatgttccaaccttgcgtagttcctcctaagccgtggactggcattactggtggtggctattgggctgcggggcgcaaacccctgcagttagtacgtactcgcagtctggcggcgcttcgccgctatgaagaagtgtcgatgccggaggtcatcaaagcagtcaacattgcgcagaatacagcatggcgtattaacaagaaagttctcgacgtagcgaataccatcacccaatggcagcactgtccagtcgcggatgtgcctgcgatggatcgtggcgaaatgccagctcgtccgttggacatcgataccaacgagattgcacttaaagcgtggaagaaagaagcttccgcgttctaccgcaaagacaaagcacgcatgagccgtcgtctgtcgatggagtttatgttatctcaggcgaacaagtttgcgaattatgaggcaatctggtttccgcaaaacatggattggcgtgggcgcgtgtacgctgtcccgatgttcaatcctcagggcaacgatatgacgaaaggcctgctgacctttgcgcaggagaaacccattggtgaagacggcttctattggctcaagattcatggcgcaaatacagctggagtggataaagtaccgtttccacaacgcatcaaatttgttgaggataaccatacgaatattatggaatgcgcgaaagcaccgctggaaaacacttggtgggcggaacaggactcgccgttctgctttctggcgttctgctttgagtatgctggcgtcatcaatagtggtctgtcgtacaactgtagcttgcctctggcatttgatggtagttgctccggcctgcaacatttctcagcgatgttacgcgacgaaattggcggcaaagctgtgaatctcctcccatctgcggaataccaggatatttatcgtatcgtcagcgacaaagttaacgagatgctgaaacaagatctgattaacggtacctctaccaccgtggaaacggtgactgataaaaagacaggcgaaattacccaacgcacgaaatacgggaccaaagttatggcacagtggtggttagaacacggtgtgaatcgtggcgtcacgaaacgcccggttatgactttggtgtatgggagcaaagagtttggattccgcgatcaagtgctgagtgacaccattcaaccggcgatcgataacggcaagggtgacatgtttctgaatccgaatcaggctgctggttacatggcgaaactgatctggaacgcagtgtccgggaccgtagtcgcagcagttgaggcgatgaactggctgaaaagtgcggcgaaattacttgctgctgaagtgaaggatgagaagacggatacagttctgcgtggccgctgcgcagtacattgggtgactcccgacggcttccctgtgtggcaggaatacaagaagcctattcaaacgcgcttgaacctgatgttcctcggtcagttccgcttacagcctaccattaacaccaacaaagatagcgagattgatgcacgcaaacaggtgtctggtatcgctcctaactttgtacacagcctggacggtaaccaccttcgtatgactgtagtgtgggcacacgagaagtacggaatcgaatcttttgcactgattcacgactccttcggtaccattccggctgacgctgcgaacctgttcaaagcagtgcgcgaaactttcgttgacacatatgagtcttgtgatgtactggctgatttctacgaccagattgctgaccagttgcacgagtctcaacgcgacaaaatgccagcacttccggctaaaggtaagttgaacctccgtgacatcttaaaatcggacttcgcgttcgcg

SEQ ID NO: 1724 - protein, 890 aa, synthetic construct
  REGION 1..890: note = Variant of RNA polymerase
MHHHHHHMNTINIAKNDFSDIELAAIPFNTLADHYGERLAREQLALEHESYEMGEARFRKMFERQLKAGEVADNAAAKPLITTLLPKMIARINDWFEAVKAKRGKRPTAFQFLQEIKPEAVAYITIKTTLACLTSADNTTVQAVASAIGRAIEDEARFGRIRDLEAKHFKKNVEEQLNKRVGHVYKKAFMQVVEHDMLSKGLLGGEAWSSWHKEDSIHVGVRCIEMLIESTGMVSLHRQNAGVVGADSETIELAPEYAEAIATRAGALAGISPMFQPCVVPPKPWTGITGGGYWAAGRKPLQLVRTRSLAALRRYEEVSMPEVIKAVNIAQNTAWRINKKVLDVANTITQWQHCPVADVPAMDRGEMPARPLDIDTNEIALKAWKKEASAFYRKDKARMSRRLSMEFMLSQANKFANYEAIWFPQNMDWRGRVYAVPMFNPQGNDMTKGLLTFAQEKPIGEDGFYWLKIHGANTAGVDKVPFPQRIKFVEDNHTNIMECAKAPLENTWWAEQDSPFCFLAFCFEYAGVINSGLSYNCSLPLAFDGSCSGLQHFSAMLRDEIGGKAVNLLPSAEYQDIYRIVSDKVNEMLKQDLINGTSTTVETVTDKKTGEITQRTKYGTKVMAQWWLEHGVNRGVTKRPVMTLVYGSKEFGFRDQVLSDTIQPAIDNGKGDMFLNPNQAAGYMAKLIWNAVSGTVVAAVEAMNWLKSAAKLLAAEVKDEKTDTVLRGRCAVHWVTPDGFPVWQEYKKPIQTRLNLMFLGQFRLQPTINTNKDSEIDARKQVSGIAPNFVHSLDGNHLRMTVVWAHEKYGIESFALIHDSFGTIPADAANLFKAVRETFVDTYESCDVLADFYDQIADQLHESQRDKMPALPAKGKLNLRDILKSDFAFA

SEQ ID NO: 1725 - DNA, 2670 bp, synthetic construct
  misc_feature 1..2670: note = Variant of RNA polymerase
  source 1..2670: mol_type = other DNA
atgcaccatcaccatcaccatatgaacacgattaacattgctaagaacgacttctctgacatcgaactggctgctatcccgttcaacactctggctgaccattacggtgagcgtttagctcgcgaacagttggcccttgagcatgagtcttacgagatgggtgaagcacgcttccgcaagatgtttgagcgtcaacttaaagctggtgaggttgcggataacgctgccgccaagcctctcatcactaccctactccctaagatgattgcacgcatcaacgactggtttgaggaagtgaaagctaagcgcggcaagcgcccgacagccttccagttcctgcaagaaatcaagccggaagccgtagcgtacatcaccattaagaccactctggcttgcctaaccagtgcggacaatacaaccgttcaggctgtagcaagcgcaatcggtcgggccattgaggacgaggctcgcttcggtcgtatccgtgaccttgaagctaagcacttcaagaagaacgttgaggaacaactcaacaagcgcgtagggcacgtctacaagaaagcatttatgcaagttgtcgagcacgacatgctctctaagggtctactcggtggcgaggcgtggtcttcgtggcataaggaagactctattcatgtaggagtacgctgcatcgagatgctcattgagtcaaccggaatggttagcttattgcgccaaaatgctggcgtagtgggtgcagactctgagactatcgaactcgcacctgaatacgctgaggctatcgcaacccgtgcaggtgcgctggctggcatctctccgatgttccaaccttgcgtagttcctcctaagccgtggactggcattactggtggtggctattgggctgcggggcgcaaacccctgcagttagtacgtactcgcagtctggcggcgcttcgccgctatgaagaagtgtcgatgccggaggtcatcaaagcagtcaacattgcgcagaatacagcatggcgtattaacaagaaagttctcgacgtagcgaataccatcacccaatggcagcactgtccagtcgcggatgtgcctgcgatggatcgtggcgaaatgccagctcgtccgttggacatcgataccaacgagattgcacttaaagcgtggaagaaagaagcttccgcgttctaccgcaaagacaaagcacgcatgagccgtcgtctgtcgatggagtttatgttatctcaggcgaacaagtttgcgaattatgaggcaatctggtttccgcaaaacatggattggcgtgggcgcgtgtacgctgtcccgatgttcaatcctcagggcaacgatatgacgaaaggcctgctgacctttgcgcaggagaaacccattggtgaagacggcttctattggctcaagattcatggcgcaaatacagctggagtggataaagtaccgtttccacaacgcatcaaatttgttgaggataaccatacgaatattatggaatgcgcgaaagcaccgctggaaaacacttggtgggcggaacaggactcgccgttctgctttctggcgttctgctttgagtatgctggcgtcatcaatagtggtctgtcgtacaactgtagcttgcctctggcatttgatggtagttgctccggcctgcaacatttctcagcgatgttacgcgacgaaattggcggcaaagctgtgaatctcctcccatctgcggaataccaggatatttatcgtatcgtcagcgacaaagttaacgagatgctgaaacaagatctgattaacggtacctctaccaccgtggaaacggtgactgataaaaagacaggcgaaattacccaacgcacgaaatacgggaccaaagttatggcacagtggtggttagaacacggtgtgaatcgtggcgtcacgaaacgcccggttatgactttggtgtatgggagcaaagagtttggattccgcgatcaagtgctgagtgacaccattcaaccggcgatcgataacggcaagggtgacatgtttctgaatccgaatcaggctgctggttacatggcgaaactgatctggaacgcagtgtccgggaccgtagtcgcagcagttgaggcgatgaactggctgaaaagtgcggcgaaattacttgctgctgaagtgaaggatgagaagacggatacagttctgcgtggccgctgcgcagtacattgggtgactcccgacggcttccctgtgtggcaggaatacaagaagcctattcaaacgcgcttgaacctgatgttcctcggtcagttccgcttacagcctaccattaacaccaacaaagatagcgagattgatgcacgcaaacaggtgtctggtatcgctcctaactttgtacacagcctggacggtaaccaccttcgtatgactgtagtgtgggcacacgagaagtacggaatcgaatcttttgcactgattcacgactccttcggtaccattccggctgacgctgcgaacctgttcaaagcagtgcgcgaaactttcgttgacacatatgagtcttgtgatgtactggctgatttctacgaccagattgctgaccagttgcacgagtctcaacgcgacaaaatgccagcacttccggctaaaggtaagttgaacctccgtgacatcttaaaatcggacttcgcgttcgcg

SEQ ID NO: 1726 - protein, 890 aa, synthetic construct
  REGION 1..890: note = Variant of RNA polymerase
MHHHHHHMNTINIAKNDFSDIELAAIPFNTLADHYGERLAREQLALEHESYEMGEARFRKMFERQLKAGEVADNAAAKPLITTLLPKMIARINDWFEEVKAKRGKRPTAFQFLQEIKPEAVAYITIKTTLACLTSADNTTVQAVASAIGRAIEDEARFGRIRDLEAKHFKKNVEEQLNKRVGHVYKKAFMQVVEHDMLSKGLLGGEAWSSWHKEDSIHVGVRCIEMLIESTGMVSLLRQNAGVVGADSETIELAPEYAEAIATRAGALAGISPMFQPCVVPPKPWTGITGGGYWAAGRKPLQLVRTRSLAALRRYEEVSMPEVIKAVNIAQNTAWRINKKVLDVANTITQWQHCPVADVPAMDRGEMPARPLDIDTNEIALKAWKKEASAFYRKDKARMSRRLSMEFMLSQANKFANYEAIWFPQNMDWRGRVYAVPMFNPQGNDMTKGLLTFAQEKPIGEDGFYWLKIHGANTAGVDKVPFPQRIKFVEDNHTNIMECAKAPLENTWWAEQDSPFCFLAFCFEYAGVINSGLSYNCSLPLAFDGSCSGLQHFSAMLRDEIGGKAVNLLPSAEYQDIYRIVSDKVNEMLKQDLINGTSTTVETVTDKKTGEITQRTKYGTKVMAQWWLEHGVNRGVTKRPVMTLVYGSKEFGFRDQVLSDTIQPAIDNGKGDMFLNPNQAAGYMAKLIWNAVSGTVVAAVEAMNWLKSAAKLLAAEVKDEKTDTVLRGRCAVHWVTPDGFPVWQEYKKPIQTRLNLMFLGQFRLQPTINTNKDSEIDARKQVSGIAPNFVHSLDGNHLRMTVVWAHEKYGIESFALIHDSFGTIPADAANLFKAVRETFVDTYESCDVLADFYDQIADQLHESQRDKMPALPAKGKLNLRDILKSDFAFA

SEQ ID NO: 1727 - DNA, 2670 bp, synthetic construct
  misc_feature 1..2670: note = Variant of RNA polymerase
  source 1..2670: mol_type = other DNA
atgcaccatcaccatcaccatatgaacacgattaacattgctaagaacgacttctctgacatcgaactggctgctatcccgttcaacactctggctgaccattacggtgagcgtttagctcgcgaacagttggcccttgagcatgagtcttacgagatgggtgaagcacgcttccgcaagatgtttgagcgtcaacttaaagctggtgaggttgcggataacgctgccgccaagcctctcatcactaccctactccctaagatgattgcacgcatcaacgactggtttgaggaagtgaaagctaagcgcggcaagcgcccgacagccttccagttcctgcaagaaatcaagccggaagccgtagcgtacatcaccattaagaccactctggcttgcctaaccagtgcggacaatacaaccgttcaggctgtagcaagcgcaatcggtcgggccattgaggacgaggctcgcttcggtcgtatccgtgaccttgaagctaagcacttcaagaagaacgttgaggaacaactcaacaagcgcgtagggcacgtctacaagaaagcatttatgcaagttgtcgagcacgacatgctctctaagggtctactcggtggcgaggcgtggtcttcgtggcataaggaagactctattcatgtaggagtacgctgcatcgagatgctcattgagtcaaccggaatggttagcttacaccgccaaaatgctggcgtagtgggtgcagactctgagactatcgaactcgcacctgaatacgctgaggctatcgcaacccgtgcaggtgcgctggctggcatctctccgatgttccaaccttgcgtagttcctcctaagccgtggactggcattactggtggtggctattgggctgcggggcgcaaacccctgcagttagtacgtactcgcagtctgcttgcgcttcgccgctatgaagaagtgtcgatgccggaggtcatcaaagcagtcaacattgcgcagaatacagcatggcgtattaacaagaaagttctcgacgtagcgaataccatcacccaatggcagcactgtccagtcgcggatgtgcctgcgatggatcgtggcgaaatgccagctcgtccgttggacatcgataccaacgagattgcacttaaagcgtggaagaaagaagcttccgcgttctaccgcaaagacaaagcacgcatgagccgtcgtctgtcgatggagtttatgttatctcaggcgaacaagtttgcgaattatgaggcaatctggtttccgcaaaacatggattggcgtgggcgcgtgtacgctgtcccgatgttcaatcctcagggcaacgatatgacgaaaggcctgctgacctttgcgcaggagaaacccattggtgaagacggcttctattggctcaagattcatggcgcaaatacagctggagtggataaagtaccgtttccacaacgcatcaaatttgttgaggataaccatacgaatattatggaatgcgcgaaagcaccgctggaaaacacttggtgggcggaacaggactcgccgttctgctttctggcgttctgctttgagtatgctggcgtcatcaatagtggtctgtcgtacaactgtagcttgcctctggcatttgatggtagttgctccggcctgcaacatttctcagcgatgttacgcgacgaaattggcggcaaagctgtgaatctcctcccatctgcggaataccaggatatttatcgtatcgtcagcgacaaagttaacgagatgctgaaacaagatctgattaacggtacctctaccaccgtggaaacggtgactgataaaaagacaggcgaaattacccaacgcacgaaatacgggaccaaagttatggcacagtggtggttagaacacggtgtgaatcgtggcgtcacgaaacgcccggttatgactttggtgtatgggagcaaagagtttggattccgcgatcaagtgctgagtgacaccattcaaccggcgatcgataacggcaagggtgacatgtttctgaatccgaatcaggctgctggttacatggcgaaactgatctggaacgcagtgtccgggaccgtagtcgcagcagttgaggcgatgaactggctgaaaagtgcggcgaaattacttgctgctgaagtgaaggatgagaagacggatacagttctgcgtggccgctgcgcagtacattgggtgactcccgacggcttccctgtgtggcaggaatacaagaagcctattcaaacgcgcttgaacctgatgttcctcggtcagttccgcttacagcctaccattaacaccaacaaagatagcgagattgatgcacgcaaacaggtgtctggtatcgctcctaactttgtacacagcctggacggtaaccaccttcgtatgactgtagtgtgggcacacgagaagtacggaatcgaatcttttgcactgattcacgactccttcggtaccattccggctgacgctgcgaacctgttcaaagcagtgcgcgaaactttcgttgacacatatgagtcttgtgatgtactggctgatttctacgaccagattgctgaccagttgcacgagtctcaacgcgacaaaatgccagcacttccggctaaaggtaagttgaacctccgtgacatcttaaaatcggacttcgcgttcgcg

SEQ ID NO: 1728 - protein, 890 aa, synthetic construct
  REGION 1..890: note = Variant of RNA polymerase
MHHHHHHMNTINIAKNDFSDIELAAIPFNTLADHYGERLAREQLALEHESYEMGEARFRKMFERQLKAGEVADNAAAKPLITTLLPKMIARINDWFEEVKAKRGKRPTAFQFLQEIKPEAVAYITIKTTLACLTSADNTTVQAVASAIGRAIEDEARFGRIRDLEAKHFKKNVEEQLNKRVGHVYKKAFMQVVEHDMLSKGLLGGEAWSSWHKEDSIHVGVRCIEMLIESTGMVSLHRQNAGVVGADSETIELAPEYAEAIATRAGALAGISPMFQPCVVPPKPWTGITGGGYWAAGRKPLQLVRTRSLLALRRYEEVSMPEVIKAVNIAQNTAWRINKKVLDVANTITQWQHCPVADVPAMDRGEMPARPLDIDTNEIALKAWKKEASAFYRKDKARMSRRLSMEFMLSQANKFANYEAIWFPQNMDWRGRVYAVPMFNPQGNDMTKGLLTFAQEKPIGEDGFYWLKIHGANTAGVDKVPFPQRIKFVEDNHTNIMECAKAPLENTWWAEQDSPFCFLAFCFEYAGVINSGLSYNCSLPLAFDGSCSGLQHFSAMLRDEIGGKAVNLLPSAEYQDIYRIVSDKVNEMLKQDLINGTSTTVETVTDKKTGEITQRTKYGTKVMAQWWLEHGVNRGVTKRPVMTLVYGSKEFGFRDQVLSDTIQPAIDNGKGDMFLNPNQAAGYMAKLIWNAVSGTVVAAVEAMNWLKSAAKLLAAEVKDEKTDTVLRGRCAVHWVTPDGFPVWQEYKKPIQTRLNLMFLGQFRLQPTINTNKDSEIDARKQVSGIAPNFVHSLDGNHLRMTVVWAHEKYGIESFALIHDSFGTIPADAANLFKAVRETFVDTYESCDVLADFYDQIADQLHESQRDKMPALPAKGKLNLRDILKSDFAFA

SEQ ID NO: 1729 - DNA, 2670 bp, synthetic construct
  misc_feature 1..2670: note = Variant of RNA polymerase
  source 1..2670: mol_type = other DNA
atgcaccatcaccatcaccatatgaacacgattaacattgctaagaacgacttctctgacatcgaactggctgctatcccgttcaacactctggctgaccattacggtgagcgtttagctcgcgaacagttggcccttgagcatgagtcttacgagatgggtgaagcacgcttccgcaagatgtttgagcgtcaacttaaagctggtgaggttgcggataacgctgccgccaagcctctcatcactaccctactccctaagatgattgcacgcatcaacgactggtttgaggaagtgaaagctaagcgcggcaagcgcccgacagccttccagttcctgcaagaaatcaagccggaagccgtagcgtacatcaccattaagaccactctggcttgcctaaccagcgcggacaatcgcaccgttcaggctgtagcaagcgcaatcggtcgggccattgaggacgaggctcgcttcggtcgtatccgtgaccttgaagctaagcacttcaagaagaacgttgaggaacaactcaacaagcgcgtagggcacgtctacaagaaagcatttatgcaagttgtcgagcacgacatgctctctaagggtctactcggtggcgaggcgtggtcttcgtggcataaggaagactctattcatgtaggagtacgctgcatcgagatgctcattgagtcaaccggaatggttagcttacaccgccaaaatgctggcgtagtaggtcaagactctgagactatcgaactcgcacctgaatacgctgaggctatcgcaacccgtgcaggtgcgctggctggcatctctccgatgttccaaccttgcgtagttcctcctaagccgtggactggcattactggtggtggctattgggctgcggggcgcaaacccctgcagttagtacgtactcgcagtcgtaaggcgcttcgccgctatgaagaagtgtcgatgccggaggtcatcaaagcagtcaacattgcgcagaatacagcatggcgtattaacaagaaagttctcgacgtagcgaataccatcacccaatggcagcactgtccagtccgtgatgtccctgcgatggatcgtggcgaaatgccagctcgtccgttggacatcgataccaacgagattgcacttaaagcgtggaagaaagcggcttccgcgttctaccgcaaagacaaagcacgcgttagccgtcgtctgtcaatggagtttatgttatctcaggcgaacaagtttgcgaattatgaggcaatctggtttccgcaaaacatggattggcgtgggcgcgtgtacgctgtcccgatgttcaatcctcagggcaacgatatgacgaaaggcctgctgacctttgcgcaggagaaacccattggtgaagacggcttctattggctcaagattcatggcgcaaatacagctggagtggataaagtaccgtttccacaacgcatcaaatttgttgaggataaccatacgaatattatggaatgcgcgaaagcaccgctggaaaacacttggtgggcggaacaggactcgccgttctgctttctggcgttctgctttgagtatgctggcgtcatcaatagtggtctgtcgtacaactgtagcttgcctctggcatttgatggtagttgctccggcctgcaacatttctcagcgatgttacgcgacgaaattggcggcaaagctgtgaatctcctcccatctgcggaataccaggatatttatcgtatcgtcagcgacaaagttaacgagatgctgaaacaagatctgattaacggtacctctaccaccgtggaaacggtgactgataagaagacaggcgaaattacccaacgcacgaaatacgggaccaaagttatggcacagtggtggttagaacacggtgtgaatcgtggcgtcacgaaacgctcggttatgactttggtgtatgggagcaaagagtttggattccgcgaccaagtgctgagtgacaccattcaaaaagcgatcgataacggcaagggtgacatgtttctgaatccgaatcaggctgctggttacatggcgaaactgatctggaacgcagtgtccgggaccgtagtcgcagcagttgaggcgatgaactggctgaaaagtgcggcgaaattacttgctgctgaagtgaaggatcgtaagacggatacagttctgcgtggccgctgcgcagtacattgggtgactcccgacggcttccctgtgtggcaggaatacaagaagcctattcagacgcgcttgaacctgatgttcctcggtcagttccgcttacagcctaccattaacaccaacaaagatagcgagattgatgcacgcaaacaggtgtctggtatcgctcctaactttgtacacagcctggacggtaaccaccttcgtatgactgtagtgtgggcacacgagaagtacggaatcgaatcttttgcactgattcacgactccttcggtaccattccggctgacgctgcgaacctgttcaaagcagtgcgcgaaactttcgttgacacatatgagtcttgtgatgtactggctgatttctacgaccagattgctgaccagttgcacgagtctcaacgcgacaaaatgccagcacttccggctaaaggtaacttgaacctccgtgacatcttaaaatcggacttcgcgttcgcg

SEQ ID NO: 1730 - protein, 890 aa, synthetic construct
  REGION 1..890: note = Variant of RNA polymerase
MHHHHHHMNTINIAKNDFSDIELAAIPFNTLADHYGERLAREQLALEHESYEMGEARFRKMFERQLKAGEVADNAAAKPLITTLLPKMIARINDWFEEVKAKRGKRPTAFQFLQEIKPEAVAYITIKTTLACLTSADNRTVQAVASAIGRAIEDEARFGRIRDLEAKHFKKNVEEQLNKRVGHVYKKAFMQVVEHDMLSKGLLGGEAWSSWHKEDSIHVGVRCIEMLIESTGMVSLHRQNAGVVGQDSETIELAPEYAEAIATRAGALAGISPMFQPCVVPPKPWTGITGGGYWAAGRKPLQLVRTRSRKALRRYEEVSMPEVIKAVNIAQNTAWRINKKVLDVANTITQWQHCPVRDVPAMDRGEMPARPLDIDTNEIALKAWKKAASAFYRKDKARVSRRLSMEFMLSQANKFANYEAIWFPQNMDWRGRVYAVPMFNPQGNDMTKGLLTFAQEKPIGEDGFYWLKIHGANTAGVDKVPFPQRIKFVEDNHTNIMECAKAPLENTWWAEQDSPFCFLAFCFEYAGVINSGLSYNCSLPLAFDGSCSGLQHFSAMLRDEIGGKAVNLLPSAEYQDIYRIVSDKVNEMLKQDLINGTSTTVETVTDKKTGEITQRTKYGTKVMAQWWLEHGVNRGVTKRSVMTLVYGSKEFGFRDQVLSDTIQKAIDNGKGDMFLNPNQAAGYMAKLIWNAVSGTVVAAVEAMNWLKSAAKLLAAEVKDRKTDTVLRGRCAVHWVTPDGFPVWQEYKKPIQTRLNLMFLGQFRLQPTINTNKDSEIDARKQVSGIAPNFVHSLDGNHLRMTVVWAHEKYGIESFALIHDSFGTIPADAANLFKAVRETFVDTYESCDVLADFYDQIADQLHESQRDKMPALPAKGNLNLRDILKSDFAFA

SEQ ID NO: 1731 - DNA, 2670 bp, synthetic construct
  misc_feature 1..2670: note = Variant of RNA polymerase
  source 1..2670: mol_type = other DNA
atgcaccatcaccatcaccatatgaacacgattaacattgctaagaacgacttctctgacatcgaactggctgctatcccgttcaacactctggctgaccattacggtgagcgtttagctcgcgaacagttggcccttgagcatgagtcttacgagatgggtgaagcacgcttccgcaagatgtttgagcgtcaacttaaagctggtgaggttgcggataacgctgccgccaagcctctcatcactaccctactccctaagatgattgcacgcatcaacgactggtttgaggaagtgaaagctaagcgcggcaagcgcccgacagccttccagttcctgcaagaaatcaagccggaagccgtagcgtacatcaccattaagaccactctggcttgcctaaccggcgcggacaatcgcaccgttcaggctgtagcaagcgcaatcggtcgggcaattgaggacgaggctcgcttcggtcgtatccgtgaccttgaagctaagcacttcaagaagaacgttgaggaacaactcaacaagcgcgtagggcacgtctacaagaaagcatttatgcaagttgtcgagcacgacatgctctctaagggtctactcggtggcgaggcgtggtcttcgtggcataaggaagactctattcatgtaggagtacgctgcatcgagatgctcattgagtcaaccggaatggttagcttacaccgccaaaatgctggcgtagtaggtcaagactctgagactatcgaactcgcacctgaatacgctgaggctatcgcaacccgtgcaggtgcgctggctggcatctctccgatgttccaaccttgcgtagttcctcctaagccgtggactggcattactggtggtggctattgggctgcggggcgcaaacccctgcagttagtacgtactcgcagtctggcggcgcttcgccgctatgaagaagtgtcgatgccggaggtcatcaaagcagtcaacattgcgcagaatacagcatggcgtattaacaagaaagttctcgacgtagcgaataccatcacccaatggcagcactgtccagtccgtgatatccctgcgatggatcgtggcgaaatgccagctcgtccgttggacatcgataccaacgagattgcacttaaagcgtggaagaaagcggcttccgcgttctaccgcaaagacaaagcacgcgttagccgtcgtctgtcaatggagtttatgttatctcaggcgaacaagtttgcgaattatgaggcaatctggtttccgcaaaacatggattggcgtgggcgcgtgtacgctgtcccgatgttcaatcctcagggcaacgatatgacgaaaggcctgctgacctttgcgcaggagaaacccattggtgaagacggcttctattggctcaagattcatggcgcaaatacagctggagtggataaagtaccgtttccacaacgcatcaaatttgttgaggataaccatacgaatattatggaatgcgcgaaagcaccgctggaaaacacttggtgggcggaacaggactcgccgttctgctttctggcgttctgctttgagtatgctggcgtcatcaatagtggtctgtcgtacaactgtagcttgcctctggcatttgatggtagttgctccggcctgcaacatttctcagcgatgttacgcgacgaaattggcggcaaagctgtgaatctcctcccatctgcggaataccaggatatttatcgtatcgtcagcgacaaagttaacgagatgctgaaacaagatctgattaacggtacctctaccaccgtggaaacggtgactgataagaagacaggcgaaattacccaacgcacgaaatacgggaccaaagttatggcacagtggtggttagaacacggtgtgaatcgtggcgtcacgaaacgctcggttatgactttggtgtatgggagcaaagagtttggattccgcgagcaagtgcgtagtgacaccattcaaaaagcgatcgataacggcaagggtgacatgtttctgaatccgaatcaggctgctggttacatggcgaaactgatctggaacgcagtgtccgggaccgtagtcgcagcagttgaggcgatgaactggctgaaaagtgcggcgaaattacttgctgctgaagtgaaggatcgtaagacggatacagttctgcgtggccgctgcgcagtacattgggtgactcccgacggcttccctgtgtggcaggaatacaagaagcctattcagacgcgcttgaacctgatgttcctcggtcagttccgcttacagcctaccattaacaccaacaaagatagcgagattgatgcacgcaaacaggtgtctggtatcgctcctaactttgtacacagcctggacggtaaccaccttcgtatgactgtagtgtgggcacacgagaagtacggaatcgaatcttttgcactgattcacgactccttcggtaccattccggctgacgctgcgaacctgttcaaagcagtgcgcgaaactttcgttgacacatatgagtcttgtgatgtactggctgatttctacgaccagattgctgaccagttgcacgagtctcaacgcgacaaaatgccagcacttccggctaaaggtaacttgaacctccgtgacatcttaaaatcggacttcgcgttcgcg

SEQ ID NO: 1732 - protein, 890 aa, synthetic construct
  REGION 1..890: note = Variant of RNA polymerase
MHHHHHHMNTINIAKNDFSDIELAAIPFNTLADHYGERLAREQLALEHESYEMGEARFRKMFERQLKAGEVADNAAAKPLITTLLPKMIARINDWFEEVKAKRGKRPTAFQFLQEIKPEAVAYITIKTTLACLTGADNRTVQAVASAIGRAIEDEARFGRIRDLEAKHFKKNVEEQLNKRVGHVYKKAFMQVVEHDMLSKGLLGGEAWSSWHKEDSIHVGVRCIEMLIESTGMVSLHRQNAGVVGQDSETIELAPEYAEAIATRAGALAGISPMFQPCVVPPKPWTGITGGGYWAAGRKPLQLVRTRSLAALRRYEEVSMPEVIKAVNIAQNTAWRINKKVLDVANTITQWQHCPVRDIPAMDRGEMPARPLDIDTNEIALKAWKKAASAFYRKDKARVSRRLSMEFMLSQANKFANYEAIWFPQNMDWRGRVYAVPMFNPQGNDMTKGLLTFAQEKPIGEDGFYWLKIHGANTAGVDKVPFPQRIKFVEDNHTNIMECAKAPLENTWWAEQDSPFCFLAFCFEYAGVINSGLSYNCSLPLAFDGSCSGLQHFSAMLRDEIGGKAVNLLPSAEYQDIYRIVSDKVNEMLKQDLINGTSTTVETVTDKKTGEITQRTKYGTKVMAQWWLEHGVNRGVTKRSVMTLVYGSKEFGFREQVRSDTIQKAIDNGKGDMFLNPNQAAGYMAKLIWNAVSGTVVAAVEAMNWLKSAAKLLAAEVKDRKTDTVLRGRCAVHWVTPDGFPVWQEYKKPIQTRLNLMFLGQFRLQPTINTNKDSEIDARKQVSGIAPNFVHSLDGNHLRMTVVWAHEKYGIESFALIHDSFGTIPADAANLFKAVRETFVDTYESCDVLADFYDQIADQLHESQRDKMPALPAKGNLNLRDILKSDFAFA

SEQ ID NO: 1733 - DNA, 2670 bp, synthetic construct
  misc_feature 1..2670: note = Variant of RNA polymerase
  source 1..2670: mol_type = other DNA
atgcaccatcaccatcaccatatgaacacgattaacattgctaagaacgacttctctgacatcgaactggctgctatcccgttcaacactctggctgaccattacggtgagcgtttagctcgcgaacagttggcccttgagcatgagtcttacgagatgggtgaagcacgcttccgcaagatgtttgagcgtcaacttaaagctggtgaggttgcggataacgctgccgccaagcctctcatcactaccctactccctaagatgattgcacgcatcaacgactggtttgaggaagtgaaagctaagcgcggcaagcgcccgacagccttccagttcctgcaagaaatcaagccggaagccgtagcgtacatcaccattaagaccactctggcttgcctaaccagcgcggacaatcgcaccgttcaggctgtagcaagcgcaatcggtcgggccattgaggacgaggctcgcttcggtcgtatccgtgaccttgaagctaagcacttcaagaagaacgttgaggaacaactcaacaagcgcgtagggcacgtctacaagaaagcatttatgcaagttgtcgagcacgacatgctctctaagggtctactcggtggcgaggcgtggtcttcgtggcataaggaagactctattcatgtaggagtacgctgcatcgagatgctcattgagtcaaccggaatggttagcttacaccgccaaaatgctggcgtagtaggtcaagactctgagactatcgaactcgcacctgaatacgctgaggctatcgcaacccgtgcaggtgcgctggctggcatctctccgatgttccaaccttgcgtagttcctcctaagccgtggactggcattactggtggtggctattgggctgcggggcgcaaacccctgcagttagtacgtactcgcagtctggcggcgcttcgccgctatgaagaagtgtcgatgccggaggtcatcaaagcagtcaacattgcgcagaatacagcatggcgtattaacaagaaagttctcgacgtagcgaataccatcacccaatggcagcactgtccagtcgcggatgtgcctgcgatggatcgtggcgaaatgccagctcgtccgttggacatcgataccaacgagattgcacttaaagcgtggaagaaagaggcttccgcgttctaccgcaaagacaaagcacgcgttagccgtcgtctgtcaatggagtttatgttatctcaggcgaacaagtttgcgaattatgaggcaatctggtttccgcaaaacatggattggcgtgggcgcgtgtacgctgtcccgatgttcaatcctcagggcaacgatatgacgaaaggcctgctgacctttgcgcaggagaaacccattggtgaagacggcttctattggctcaagattcatggcgcaaatacagctggagtggataaagtaccgtttccacaacgcatcaaatttgttgaggataaccatacgaatattatggaatgcgcgaaagcaccgctggaaaacacttggtgggcggaacaggactcgccgttctgctttctggcgttctgctttgagtatgctggcgtcatcaatagtggtctgtcgtacaactgtagcttgcctctggcatttgatggtagttgctccggcctgcaacatttctcagcgatgttacgcgacgaaattggcggcaaagctgtgaatctcctcccatctgcggaataccaggatatttatcgtatcgtcagcgacaaagttaacgagatgctgaaacaagatctgattaacggtacctctaccaccgtggaaacggtgactgataagaagacaggcgaaattacccaacgcacgaaatacgggaccaaagttatggcacagtggtggttagaacacggtgtgactcgtggcgtcacgaaacgctcggttatgactttggtgtatgggagcaaagagtttggattccgcgatcaagtgctgagtgacaccattcaaaaagcgatcgataacggcaagggtgacatgtttctgaatccgaatcaggctgctggttacatggcgaaactgatctggaacgcagtgtccgggaccgtagtcgcagcagttgaggcgatgaactggctgaaaagtgcggcgaaattacttgctgctgaagtgaaggatcgtaagacggatacagttctgcgtggccgctgcgcagtacattgggtgactcccgacggcttccctgtgtggcaggaatacaagaagcctattcagacgcgcttgaacctgatgttcctcggtcagttccgcttacagcctaccattaacaccaacaaagatagcgagattgatgcacgcaaacaggtgtctggtatcgctcctaactttgtacacagcctggacggtaaccaccttcgtatgactgtagtgtgggcacacgagaagtacggaatcgaatcttttgcactgattcacgactccttcggtaccattccggctgacgctgcgaacctgttcaaagcagtgcgcgaaactttcgttgacacatatgagtcttgtgatgtactggctgatttctacgaccagattgctgaccagttgcacgagtctcaacgcgacaaaatgccagcacttccggctaaaggtaacttgaacctccgtgacatcttaaaatcggacttcgcgttcgcg

SEQ ID NO: 1734 - protein, 890 aa, synthetic construct
  REGION 1..890: note = Variant of RNA polymerase
MHHHHHHMNTINIAKNDFSDIELAAIPFNTLADHYGERLAREQLALEHESYEMGEARFRKMFERQLKAGEVADNAAAKPLITTLLPKMIARINDWFEEVKAKRGKRPTAFQFLQEIKPEAVAYITIKTTLACLTSADNRTVQAVASAIGRAIEDEARFGRIRDLEAKHFKKNVEEQLNKRVGHVYKKAFMQVVEHDMLSKGLLGGEAWSSWHKEDSIHVGVRCIEMLIESTGMVSLHRQNAGVVGQDSETIELAPEYAEAIATRAGALAGISPMFQPCVVPPKPWTGITGGGYWAAGRKPLQLVRTRSLAALRRYEEVSMPEVIKAVNIAQNTAWRINKKVLDVANTITQWQHCPVADVPAMDRGEMPARPLDIDTNEIALKAWKKEASAFYRKDKARVSRRLSMEFMLSQANKFANYEAIWFPQNMDWRGRVYAVPMFNPQGNDMTKGLLTFAQEKPIGEDGFYWLKIHGANTAGVDKVPFPQRIKFVEDNHTNIMECAKAPLENTWWAEQDSPFCFLAFCFEYAGVINSGLSYNCSLPLAFDGSCSGLQHFSAMLRDEIGGKAVNLLPSAEYQDIYRIVSDKVNEMLKQDLINGTSTTVETVTDKKTGEITQRTKYGTKVMAQWWLEHGVTRGVTKRSVMTLVYGSKEFGFRDQVLSDTIQKAIDNGKGDMFLNPNQAAGYMAKLIWNAVSGTVVAAVEAMNWLKSAAKLLAAEVKDRKTDTVLRGRCAVHWVTPDGFPVWQEYKKPIQTRLNLMFLGQFRLQPTINTNKDSEIDARKQVSGIAPNFVHSLDGNHLRMTVVWAHEKYGIESFALIHDSFGTIPADAANLFKAVRETFVDTYESCDVLADFYDQIADQLHESQRDKMPALPAKGNLNLRDILKSDFAFA

SEQ ID NO: 1735 - DNA, 2670 bp, synthetic construct
  misc_feature 1..2670: note = Variant of RNA polymerase
  source 1..2670: mol_type = other DNA
atgcaccatcaccatcaccatatgaacacgattaacattgctaagaacgacttctctgacatcgaactggctgctatcccgttcaacactctggctgaccattacggtgagcgtttagctcgcgaacagttggcccttgagcatgagtcttacgagatgggtgaagcacgcttccgcaagatgtttgagcgtcaacttaaagctggtgaggttgcggataacgctgccgccaagcctctcatcactaccctactccctaagatgattgcacgcatcaacgactggtttgaggaagtgaaagctaagcgcggcaagcgcccgacagccttccagttcctgcaagaaatcaagccggaagccgtagcgtacatcaccattaagacgactctggcttgcctaaccagtgcggacaatacaaccgttcaggctgtttcgagcgcaatcggtcgggccattgaggacgaggctcgcttcggtcgtatccgtgaccttgaagctaagcacttcaagaagaacgttgaggaacaactcaacaagcgcgtagggcacgtctacaagaaagcatttatgcaagttgtcgagcacgacatgctctctaagggtctactcggtggcgaggcgtggtcttcgtggcataaggaagactctattcatgtaggagtacgctgcatcgagatgctcattgagtcaaccggaatggttagcttacgtcgccaaaatgctggcgtagtaggtcaagactctgagcgtatcgaactcgcacctgaatacgctgaggctatcgcaacccgtgcaggtgcgctggctggcatctctccgatgttccaaccttgcgtagttcctcctaagccgtggactggcattactggtggtggctattgggctgcggggcgcaaacccctgcagttagtacgtactcgcagtctggcggcgcttcgccgctatgaagaagtgtcgatgccggaggtcatcaaagcagtcaacattgcgcagaatacagcatggcgtattaacaagaaagttctcgacgtagcgaataccatcacccaatggcaacactgtccagtcgcggatgtgcctgcgatggatcgtggcgaaatgccagctcgtccgttggacatcgataccaacccgattgcacttaaagcgtggaagaaagaggcttccgcgttctaccgcaaagacaaagcacgcgttagccgtcgtctgtcaatggagtttatgttatctcaggcgaacaagtttgcgaattatgaggcaatctggtttccgcaaaacatggattggcgtgggcgcgtgtacgctgtcccgatgttcaatcctcagggcaacgatatgacgaaaggcctgctgacctttgcgcaggagaaacccattggtgaagacggcttctattggctcaagattcatggcgcaaatacagctggagtggataaagtaccgtttccacaacgcatcaaatttgttgaggataaccatacgaatattatggaatgcgcgaaagcaccgctggaaaacacttggtgggcggaacaggactcgccgttctgctttctggcgttctgctttgagtatgctggcgtcatcaatagtggtctgtcgtacaactgtagcttgcctctggcatttgatggtagttgctccggcctgcaacatttctcagcgatgttacgcgacgaaattggcggcaaagctgtgaatctcctcccatctgcggaataccaggatatttatcgtatcgtcagcgacaaagttaacgagatgctgaaacaagatctgattaacggtacctctaccaccgtggaaacggtgactgataagaagacaggcgaaattacccaacgcacgaaatacgggaccaaagttatggcacagtggtggttagaacacggtgtgaatcgtggcgtcacgaaacgctcggttatgactttggtgtatggggcgctggagtttggattccgcgatcaagtgctgagtgacaccattcaaaaagcgatcgataacggcaagggtgacatgtttctgaatccgaatcaggctgctggttacatggcgaaactgatctggaacgcagtgtccgggaccgtagtcgcagcagttgaggcgatgaactggctgaaaagtgcggcgaaattacttgctgctgaagtgaaggatcgtaagacggatacagttctgcgtggccgctgcgcagtacattgggtgactcccgacggcttccctgtgtggcaggaatacaagaagcctattcagacgcgcttgaacctgatgttcctcggtcagttccgcttacagcctaccattaacaccaacaaagatagcgagattgatgcacgcaaacaggtgtctggtatcgctcctaactttgtacacagcctggacggtaaccaccttcgtatgactgtagtgtgggcacacgagaagtacggaatcgaatcttttgcactgattcacgactccttcggtaccattccggctgacgctgcgaacctgttcaaagcagtgcgcgaaactttcgttgacacatatgagtcttgtgatgtactggctgatttctacgaccagattgctgaccagttgcacgagtctcaacgcgacaaaatgccagcacttccggctaaaggtaacttgaacctccgtgacatcttaaaatcggacttcgcgttcgcg

SEQ ID NO: 1736 - protein, 890 aa, synthetic construct
  REGION 1..890: note = Variant of RNA polymerase
MHHHHHHMNTINIAKNDFSDIELAAIPFNTLADHYGERLAREQLALEHESYEMGEARFRKMFERQLKAGEVADNAAAKPLITTLLPKMIARINDWFEEVKAKRGKRPTAFQFLQEIKPEAVAYITIKTTLACLTSADNTTVQAVSSAIGRAIEDEARFGRIRDLEAKHFKKNVEEQLNKRVGHVYKKAFMQVVEHDMLSKGLLGGEAWSSWHKEDSIHVGVRCIEMLIESTGMVSLRRQNAGVVGQDSERIELAPEYAEAIATRAGALAGISPMFQPCVVPPKPWTGITGGGYWAAGRKPLQLVRTRSLAALRRYEEVSMPEVIKAVNIAQNTAWRINKKVLDVANTITQWQHCPVADVPAMDRGEMPARPLDIDTNPIALKAWKKEASAFYRKDKARVSRRLSMEFMLSQANKFANYEAIWFPQNMDWRGRVYAVPMFNPQGNDMTKGLLTFAQEKPIGEDGFYWLKIHGANTAGVDKVPFPQRIKFVEDNHTNIMECAKAPLENTWWAEQDSPFCFLAFCFEYAGVINSGLSYNCSLPLAFDGSCSGLQHFSAMLRDEIGGKAVNLLPSAEYQDIYRIVSDKVNEMLKQDLINGTSTTVETVTDKKTGEITQRTKYGTKVMAQWWLEHGVNRGVTKRSVMTLVYGALEFGFRDQVLSDTIQKAIDNGKGDMFLNPNQAAGYMAKLIWNAVSGTVVAAVEAMNWLKSAAKLLAAEVKDRKTDTVLRGRCAVHWVTPDGFPVWQEYKKPIQTRLNLMFLGQFRLQPTINTNKDSEIDARKQVSGIAPNFVHSLDGNHLRMTVVWAHEKYGIESFALIHDSFGTIPADAANLFKAVRETFVDTYESCDVLADFYDQIADQLHESQRDKMPALPAKGNLNLRDILKSDFAFA

SEQ ID NO: 1737 - DNA, 2670 bp, synthetic construct
  misc_feature 1..2670: note = Variant of RNA polymerase
  source 1..2670: mol_type = other DNA
atgcaccatcaccatcaccatatgaacacgattaacattgctaagaacgacttctctgacatcgaactggctgctatcccgttcaacactctggctgaccattacggtgagcgtttagctcgcgaacagttggcccttgagcatgagtcttacgagatgggtgaagcacgcttccgcaagatgtttgagcgtcaacttaaagctggtgaggttgcggataacgctgccgccaagcctctcatcactaccctactccctaagatgattgcacgcatcaacgactggtttgaggaagtgaaagctaagcgcggcaagcgcccgacagccttccagttcctgcaagaaatcaagccggaagccgtagcgtacatcaccattaagaccactctggcttgcctaaccagcgcggacaatcgcaccgttcaggctgtagcaagcgctatcggtcgggcaattgaggacgaggctcgcttcggtcgtatccgtgaccttgaagctaagcacttcaagaagaacgttgaggaacaactcaacaagcgcgtagggcacgtctacaagaaagcatttatgcaagttgtcgagcacgacatgctctctaagggtctactcggtggcgaggcgtggtcttcgtggcataaggaagactctattcatgtaggagtacgctgcatcgagatgctcattgagtcaaccggaatggttagcttacaccgccaaaatgctggcgtagtaggtcaagactctgagactatcgaactcgcacctgaatacgctgaggctatcgcaacccgtgcaggtgcgctggctggcatctctccgatgttccaaccttgcgtagttcctcctaagccgtggactggcattactggtggtggctattgggctgcggggcgcaaacccctgcagttagtacgtactcgcagtctgaaggcgcttcgccgctatgaagaagtgtcgatgccggaggtcatcaaagcagtcaacattgcgcagaatacagcatggcgtattaacaagaaagttctcgacgtagcgaataccatcacccaatggcagcactgtccagtcgcggatgtgcctgcgatggatcgtggcgaaatgccagctcgtccgttggacatcgataccaacgagattgcacttaaagcgtggaagaaagcggcttccgcgttctaccgcaaagacaaagcacgcgttagccgtcgtctgtcaatggagtttatgttatctcaggcgaacaagtttgcgaattatgaggcaatctggtttccgcaaaacatggattggcgtgggcgcgtgtacgctgtcccgatgttcaatcctcagggcaacgatatgacgaaaggcctgctgacctttgcgcaggagaaacccattggtgaagacggcttctattggctcaagattcatggcgcaaatacagctggagtggataaagtaccgtttccacaacgcatcaaatttgttgaggataaccatacgaatattatggaatgcgcgaaagcaccgctggaaaacacttggtgggcggaacaggactcgccgttctgctttctggcgttctgctttgagtatgctggcgtcatcaatagtggtctgtcgtacaactgtagcttgcctctggcatttgatggtagttgctccggcctgcaacatttctcagcgatgttacgcgacgaaattggcggcaaagctgtgaatctcctcccatctgcggaataccaggatatttatcgtatcgtcagcgacaaagttaacgagatgctgaaacaagatctgattaacggtacctctaccaccgtggaaacggtgactgataagaagacaggcgaaattacccaacgcacgaaatacgggaccaaagttatggcacagtggtggttagaacacggtgtgactcgtggcgtcacgaaacgctcggttatgactttggtgtatgggagcaaagagtttggattccgcgagcaagtgaaaagtgacaccattcaaaaagcgatcgataacggcaagggtgacatgtttctgaatccgaatcaggctgctggttacatggcgaaactgatctggaacgcagtgtccgggaccgtagtcgcagcagttgaggcgatgaactggctgaaaagtgcggcgaaattacttgctgctgaagtgaaggatcgtaagacggatacagttctgcgtggccgctgcgcagtacattgggtgactcccgacggcttccctgtgtggcaggaatacaagaagcctattcagacgcgcttgaacctgatgttcctcggtcagttccgcttacagcctaccattaacaccaacaaagatagcgagattgatgcacgcaaacaggtgtctggtatcgctcctaactttgtacacagcctggacggtaaccaccttcgtatgactgtagtgtgggcacacgagaagtacggaatcgaatcttttgcactgattcacgactccttcggtaccattccggctgacgctgcgaacctgttcaaagcagtgcgcgaaactttcgttgacacatatgagtcttgtgatgtactggctgatttctacgaccagattgctgaccagttgcacgagtctcaacgcgacaaaatgccagcacttccggctaaaggtaacttgaacctccgtgacatcttaaaatcggacttcgcgttcgcg

SEQ ID NO: 1738 - protein, 890 aa, synthetic construct
  REGION 1..890: note = Variant of RNA polymerase
MHHHHHHMNTINIAKNDFSDIELAAIPFNTLADHYGERLAREQLALEHESYEMGEARFRKMFERQLKAGEVADNAAAKPLITTLLPKMIARINDWFEEVKAKRGKRPTAFQFLQEIKPEAVAYITIKTTLACLTSADNRTVQAVASAIGRAIEDEARFGRIRDLEAKHFKKNVEEQLNKRVGHVYKKAFMQVVEHDMLSKGLLGGEAWSSWHKEDSIHVGVRCIEMLIESTGMVSLHRQNAGVVGQDSETIELAPEYAEAIATRAGALAGISPMFQPCVVPPKPWTGITGGGYWAAGRKPLQLVRTRSLKALRRYEEVSMPEVIKAVNIAQNTAWRINKKVLDVANTITQWQHCPVADVPAMDRGEMPARPLDIDTNEIALKAWKKAASAFYRKDKARVSRRLSMEFMLSQANKFANYEAIWFPQNMDWRGRVYAVPMFNPQGNDMTKGLLTFAQEKPIGEDGFYWLKIHGANTAGVDKVPFPQRIKFVEDNHTNIMECAKAPLENTWWAEQDSPFCFLAFCFEYAGVINSGLSYNCSLPLAFDGSCSGLQHFSAMLRDEIGGKAVNLLPSAEYQDIYRIVSDKVNEMLKQDLINGTSTTVETVTDKKTGEITQRTKYGTKVMAQWWLEHGVTRGVTKRSVMTLVYGSKEFGFREQVKSDTIQKAIDNGKGDMFLNPNQAAGYMAKLIWNAVSGTVVAAVEAMNWLKSAAKLLAAEVKDRKTDTVLRGRCAVHWVTPDGFPVWQEYKKPIQTRLNLMFLGQFRLQPTINTNKDSEIDARKQVSGIAPNFVHSLDGNHLRMTVVWAHEKYGIESFALIHDSFGTIPADAANLFKAVRETFVDTYESCDVLADFYDQIADQLHESQRDKMPALPAKGNLNLRDILKSDFAFA

SEQ ID NO: 1739 - DNA, 2670 bp, synthetic construct
  misc_feature 1..2670: note = Variant of RNA polymerase
  source 1..2670: mol_type = other DNA
atgcaccatcaccatcaccatatgaacacgattaacattgctaagaacgacttctctgacatcgaactggctgctatcccgttcaacactctggctgaccattacggtgagcgtttagctcgcgaacagttggcccttgagcatgagtcttacgagatgggtgaagcacgcttccgcaagatgtttgagcgtcaacttaaagctggtgaggttgcggataacgctgccgccaagcctctcatcactaccctactccctaagatgattgcacgcatcaacgactggtttgaggaagtgaaagctaagcgcggcaagcgcccgacagccttccagttcctgcaagaaatcaagccggaagccgtagcgtacatcaccattaagaccactctggcttgcctaaccagtgcggacaatacaaccgttcaggctattgcgagcgcaatcggtcgggccattgaggacgaggctcgcttcggtcgtatccgtgaccttgaagctaagcacttcaagaagaacgttgaggaacaactcaacaagcgcgtagggcacgtctacaagaaagcatttatgcaagttgtcgagcacgacatgctctctaagggtctactcggtggcgaggcgtggtcttcgtggcataaggaagactctattcatgtaggagtacgctgcatcgagatgctcattgagtcaaccggaatggttagcttacgtcgccaaaatgctggcgtagtaggtcaagactctgagactatcgaactcgcacctgaatacgctgaggctatcgcaacccgtgcaggtgcgctggctggcatctctccgatgttccaaccttgcgtagttcctcctaagccgtggactggcattactggtggtggctattgggctgcggggcgcaaacccctgcagttagtacgtactcgcagtctggcggcgcttcgccgctatgaagaagtgtcgatgccggaggtcatcaaagcagtcaacattgcgcagaatacagcatggcgtattaacaagaaagttctcgacgtagcgaataccatcacccaatggcaacactgtccagtcgctgatgtccctgcgatggatcgtggcgaaatgccagctcgtccgttggacatcgataccaacgagattgcacttaaagcgtggaagaaagaagcttccgcgttctaccgcaaagacaaagcacgcgttagccgtcgtctgtcaatggagtttatgttatctcaggcgaacaagtttgcgaattatgaggcaatctggtttccgcaaaacatggattggcgtgggcgcgtgtacgctgtcccgatgttcaatcctcagggcaacgatatgacgaaaggcctgctgacctttgcgcaggagaaacccattggtgaagacggcttctattggctcaagattcatggcgcaaatacagctggagtggataaagtaccgtttccacaacgcatcaaatttgttgaggataaccatacgaatattatggaatgcgcgaaagcaccgctggaaaacacttggtgggcggaacaggactcgccgttctgctttctggcgttctgctttgagtatgctggcgtcatcaatagtggtctgtcgtacaactgtagcttgcctctggcatttgatggtagttgctccggcctgcaacatttctcagcgatgttacgcgacgaaattggcggcaaagctgtgaatctcctcccatctgcggaataccaggatatttatcgtatcgtcagcgacaaagttaacgagatgctgaaacaagatctgattaacggtacctctaccaccgtggaaacggtgactgataagaagacaggcgaaattacccaacgcacgaaatacgggaccaaagttatggcacagtggtggttagaacacggtgtgaatcgtggcgtcacgaaacgctcggttatgactttggtgtatggggcgctggagtttggattccgcgatcaagtgctgagtgacaccattcaaaaagcgatcgataacggcaagggtgacatgtttctgaatccgaatcaggctgctggttacatggcgaaactgatctggaacgcagtgtccgggaccgtagtcgcagcagttgaggcgatgaactggctgaaaagtgcggcgaaattacttgctgctgaagtgaaggatcgtaagacggatacagttctgcgtggccgctgcgcagtacattgggtgactcccgacggcttccctgtgtggcaggaatacaagaagcctattcagacgcgcttgaacctgatgttcctcggtcagttccgcttacagcctaccattaacaccaacaaagatagcgagattgatgcacgcaaacaggtgtctggtatcgctcctaactttgtacacagcctggacggtaaccaccttcgtatgactgtagtgtgggcacacgagaagtacggaatcgaatcttttgcactgattcacgactccttcggtaccattccggctgacgctgcgaacctgttcaaagcagtgcgcgaaactttcgttgacacatatgagtcttgtgatgtactggctgatttctacgaccagattgctgaccagttgcacgagtctcaacgcgacaaaatgccagcacttccggctaaaggtaacttgaacctccgtgacatcttaaaatcggacttcgcgttcgcg

SEQ ID NO: 1740 - protein, 890 aa, synthetic construct
  REGION 1..890: note = Variant of RNA polymerase
MHHHHHHMNTINIAKNDFSDIELAAIPFNTLADHYGERLAREQLALEHESYEMGEARFRKMFERQLKAGEVADNAAAKPLITTLLPKMIARINDWFEEVKAKRGKRPTAFQFLQEIKPEAVAYITIKTTLACLTSADNTTVQAIASAIGRAIEDEARFGRIRDLEAKHFKKNVEEQLNKRVGHVYKKAFMQVVEHDMLSKGLLGGEAWSSWHKEDSIHVGVRCIEMLIESTGMVSLRRQNAGVVGQDSETIELAPEYAEAIATRAGALAGISPMFQPCVVPPKPWTGITGGGYWAAGRKPLQLVRTRSLAALRRYEEVSMPEVIKAVNIAQNTAWRINKKVLDVANTITQWQHCPVADVPAMDRGEMPARPLDIDTNEIALKAWKKEASAFYRKDKARVSRRLSMEFMLSQANKFANYEAIWFPQNMDWRGRVYAVPMFNPQGNDMTKGLLTFAQEKPIGEDGFYWLKIHGANTAGVDKVPFPQRIKFVEDNHTNIMECAKAPLENTWWAEQDSPFCFLAFCFEYAGVINSGLSYNCSLPLAFDGSCSGLQHFSAMLRDEIGGKAVNLLPSAEYQDIYRIVSDKVNEMLKQDLINGTSTTVETVTDKKTGEITQRTKYGTKVMAQWWLEHGVNRGVTKRSVMTLVYGALEFGFRDQVLSDTIQKAIDNGKGDMFLNPNQAAGYMAKLIWNAVSGTVVAAVEAMNWLKSAAKLLAAEVKDRKTDTVLRGRCAVHWVTPDGFPVWQEYKKPIQTRLNLMFLGQFRLQPTINTNKDSEIDARKQVSGIAPNFVHSLDGNHLRMTVVWAHEKYGIESFALIHDSFGTIPADAANLFKAVRETFVDTYESCDVLADFYDQIADQLHESQRDKMPALPAKGNLNLRDILKSDFAFA

SEQ ID NO: 1741 - DNA, 2670 bp, synthetic construct
  misc_feature 1..2670: note = Variant of RNA polymerase
  source 1..2670: mol_type = other DNA
atgcaccatcaccatcaccatatgaacacgattaacattgctaagaacgacttctctgacatcgaactggctgctatcccgttcaacactctggctgaccattacggtgagcgtttagctcgcgaacagttggcccttgagcatgagtcttacgagatgggtgaagcacgcttccgcaagatgtttgagcgtcaacttaaagctggtgaggttgcggataacgctgccgccaagcctctcatcactaccctactccctaagatgattgcacgcatcaacgactggtttgaggaagtgaaagctaagcgcggcaagcgcccgacagccttccagttcctgcaagaaatcaagccggaagccgtagcgtacatcaccattaagaccactctggcttgcctaaccagtgcggacaatacaaccgttcaggctgtagcaagcgcaatcggtcgggccattgaggacgaggctcgcttcggtcgtatccgtgaccttgaagctaagcacttcaagaagaacgttgaggaacaactcaacaagcgcgtagggcacgtctacaagaaagcatttatgcaagttgtcgagcacgacatgctctctaagggtctactcggtggcgaggcgtggtcttcgtggcataaggaagactctattcatgtaggagtacgctgcatcgagatgctcattgagtcaaccggaatggttagcttacaccgccaaaatgctggcgtagtaggtcaagactctgagcgtatcgaactcgcacctgaatacgctgaggctatcgcaacccgtgcaggtgcgctggctggcatctctccgatgttccaaccttgcgtagttcctcctaagccgtggactggcattactggtggtggctattgggctgcggggcgcaaacccctgcagttagtacgtactcgcagtctggcggcgcttcgccgctatgaagaagtgtcgatgccggaggtcatcaaagcagtcaacattgcgcagaatacagcatggcgtattaacaagaaagttctcgacgtagcgaataccatcacccaatggaaacactgtccagtcgctgatatccctgcgatggatcgtggcgaaatgccagctcgtccgttggacatcgataccaacgagattgcacttaaagcgtggaagaaagaagcttccgcgttctaccgcaaagacaaagcacgcgttagccgtcgtctgtcaatggagtttatgttatctcaggcgaacaagtttgcgaattatgaggcaatctggtttccgcaaaacatggattggcgtgggcgcgtgtacgctgtcccgatgttcaatcctcagggcaacgatatgacgaaaggcctgctgacctttgcgcaggagaaacccattggtgaagacggcttctattggctcaagattcatggcgcaaatacagctggagtggataaagtaccgtttccacaacgcatcaaatttgttgaggataaccatacgaatattatggaatgcgcgaaagcaccgctggaaaacacttggtgggcggaacaggactcgccgttctgctttctggcgttctgctttgagtatgctggcgtcatcaatagtggtctgtcgtacaactgtagcttgcctctggcatttgatggtagttgctccggcctgcaacatttctcagcgatgttacgcgacgaaattggcggcaaagctgtgaatctcctcccatctgcggaataccaggatatttatcgtatcgtcagcgacaaagttaacgagatgctgaaacaagatctgattaacggtacctctaccaccgtggaaacggtgactgataagaagacaggcgaaattacccaacgcacgaaatacgggaccaaagttatggcacagtggtggttagaacacggtgtgaatcgtggcgtcacgaaacgctcggttatgactttggtgtatggggcgctggagtttggattccgcgatcaagtgctgagtgacaccattcaaaaagcgatcgataacggcaagggtgacatgtttctgaatccgaatcaggctgctggttacatggcgaaactgatctggaacgcagtgtccgggaccgtagtcgcagcagttgaggcgatgaactggctgaaaagtgcggcgaaattacttgctgctgaagtgaaggatcgtaagacggatacagttctgcgtggccgctgcgcagtacattgggtgactcccgacggcttccctgtgtggcaggaatacaagaagcctattcagacgcgcttgaacctgatgttcctcggtcagttccgcttacagcctaccattaacaccaacaaagatagcgagattgatgcacgcaaacaggtgtctggtatcgctcctaactttgtacacagcctggacggtaaccaccttcgtatgactgtagtgtgggcacacgagaagtacggaatcgaatcttttgcactgattcacgactccttcggtaccattccggctgacgctgcgaacctgttcaaagcagtgcgcgaaactttcgttgacacatatgagtcttgtgatgtactggctgatttctacgaccagattgctgaccagttgcacgagtctcaacgcgacaaaatgccagcacttccggctaaaggtaacttgaacctccgtgacatcttaaaatcggacttcgcgttcgcg

SEQ ID NO: 1742 - protein, 890 aa, synthetic construct
  REGION 1..890: note = Variant of RNA polymerase
MHHHHHHMNTINIAKNDFSDIELAAIPFNTLADHYGERLAREQLALEHESYEMGEARFRKMFERQLKAGEVADNAAAKPLITTLLPKMIARINDWFEEVKAKRGKRPTAFQFLQEIKPEAVAYITIKTTLACLTSADNTTVQAVASAIGRAIEDEARFGRIRDLEAKHFKKNVEEQLNKRVGHVYKKAFMQVVEHDMLSKGLLGGEAWSSWHKEDSIHVGVRCIEMLIESTGMVSLHRQNAGVVGQDSERIELAPEYAEAIATRAGALAGISPMFQPCVVPPKPWTGITGGGYWAAGRKPLQLVRTRSLAALRRYEEVSMPEVIKAVNIAQNTAWRINKKVLDVANTITQWKHCPVADIPAMDRGEMPARPLDIDTNEIALKAWKKEASAFYRKDKARVSRRLSMEFMLSQANKFANYEAIWFPQNMDWRGRVYAVPMFNPQGNDMTKGLLTFAQEKPIGEDGFYWLKIHGANTAGVDKVPFPQRIKFVEDNHTNIMECAKAPLENTWWAEQDSPFCFLAFCFEYAGVINSGLSYNCSLPLAFDGSCSGLQHFSAMLRDEIGGKAVNLLPSAEYQDIYRIVSDKVNEMLKQDLINGTSTTVETVTDKKTGEITQRTKYGTKVMAQWWLEHGVNRGVTKRSVMTLVYGALEFGFRDQVLSDTIQKAIDNGKGDMFLNPNQAAGYMAKLIWNAVSGTVVAAVEAMNWLKSAAKLLAAEVKDRKTDTVLRGRCAVHWVTPDGFPVWQEYKKPIQTRLNLMFLGQFRLQPTINTNKDSEIDARKQVSGIAPNFVHSLDGNHLRMTVVWAHEKYGIESFALIHDSFGTIPADAANLFKAVRETFVDTYESCDVLADFYDQIADQLHESQRDKMPALPAKGNLNLRDILKSDFAFA

SEQ ID NO: 1743 - DNA, 2670 bp, synthetic construct
  misc_feature 1..2670: note = Variant of RNA polymerase
  source 1..2670: mol_type = other DNA
atgcaccatcaccatcaccatatgaacacgattaacattgctaagaacgacttctctgacatcgaactggctgctatcccgttcaacactctggctgaccattacggtgagcgtttagctcgcgaacagttggcccttgagcatgagtcttacgagatgggtgaagcacgcttccgcaagatgtttgagcgtcaacttaaagctggtgaggttgcggataacgctgccgccaagcctctcatcactaccctactccctaagatgattgcacgcatcaacgactggtttgaggaagtgaaagctaagcgcggcaagcgcccgacagccttccagttcctgcaagaaatcaagccggaagccgtagcgtacatcaccattaagaccactctggcttgcctaaccagtgcggacaatacaaccgttcaggctgtagcaagcgcaatcggtcgggccattgaggacgaggctcgcttcggtcgtatccgtgaccttgaagctaagcacttcaagaagaacgttgaggaacaactcaacaagcgcgtagggcacgtctacaagaaagcatttatgcaagttgtcgagcacgacatgctctctaagggtctactcggtggcgaggcgtggtcttcgtggcataaggaagactctattcatgtaggagtacgctgcatcgagatgctcattgagtcaaccggaatggttagcttacgtcgccaaaatgctggcgtagtaggtcaagactctgagactatcgaactcgcacctgaatacgctgaggctatcgcaacccgtgcaggtgcgctggctggcatctctccgatgttccaaccttgcgtagttcctcctaagccgtggactggcattactggtggtggctattgggctgcggggcgcaaacccctgcagttagtacgtactcgcagtctggcggcgcttcgccgctatgaagaagtgtcgatgccggaggtcatcaaagcagtcaacattgcgcagaatacagcatggcgtattaacaagaaagttctcgacgtagcgaataccatcacccaatggcagcactgtccagtcgcggatgtgcctgcgatggatcgtggcgaaatgccagctcgtccgttggacatcgataccaacccgattgcacttaaagcgtggaagaaagaagcttccgcgttctaccgcaaagacaaagcacgcgttagccgtcgtctgtcaatggagtttatgttatctcaggcgaacaagtttgcgaattatgaggcaatctggtttccgcaaaacatggattggcgtgggcgcgtgtacgctgtcccgatgttcaatcctcagggcaacgatatgacgaaaggcctgctgacctttgcgcaggagaaacccattggtgaagacggcttctattggctcaagattcatggcgcaaatacagctggagtggataaagtaccgtttccacaacgcatcaaatttgttgaggataaccatacgaatattatggaatgcgcgaaagcaccgctggaaaacacttggtgggcggaacaggactcgccgttctgctttctggcgttctgctttgagtatgctggcgtcatcaatagtggtctgtcgtacaactgtagcttgcctctggcatttgatggtagttgctccggcctgcaacatttctcagcgatgttacgcgacgaaattggcggcaaagctgtgaatctcctcccatctgcggaataccaggatatttatcgtatcgtcagcgacaaagttaacgagatgctgaaacaagatctgattaacggtacctctaccaccgtggaaacggtgactgataagaagacaggcgaaattacccaacgcacgaaatacgggaccaaagttatggcacagtggtggttagaacacggtgtgaatcgtggcgtcacgaaacgctcggttatgactttggtgtatggggcgctggagtttggattccgcgatcaagtgctgagtgacaccattcaaaaagcgatcgataacggcaagggtgacatgtttctgaatccgaatcaggctgctggttacatggcgaaactgatctggaacgcagtgtccgggaccgtagtcgcagcagttgaggcgatgaactggctgaaaagtgcggcgaaattacttgctgctgaagtgaaggatcgtaagacggatacagttctgcgtggccgctgcgcagtacattgggtgactcccgacggcttccctgtgtggcaggaatacaagaagcctattcagacgcgcttgaacctgatgttcctcggtcagttccgcttacagcctaccattaacaccaacaaagatagcgagattgatgcacgcaaacaggtgtctggtatcgctcctaactttgtacacagcctggacggtaaccaccttcgtatgactgtagtgtgggcacacgagaagtacggaatcgaatcttttgcactgattcacgactccttcggtaccattccggctgacgctgcgaacctgttcaaagcagtgcgcgaaactttcgttgacacatatgagtcttgtgatgtactggctgatttctacgaccagattgctgaccagttgcacgagtctcaacgcgacaaaatgccagcacttccggctaaaggtaacttgaacctccgtgacatcttaaaatcggacttcgcgttcgcg

SEQ ID NO: 1744 - protein, 890 aa, synthetic construct
  REGION 1..890: note = Variant of RNA polymerase
MHHHHHHMNTINIAKNDFSDIELAAIPFNTLADHYGERLAREQLALEHESYEMGEARFRKMFERQLKAGEVADNAAAKPLITTLLPKMIARINDWFEEVKAKRGKRPTAFQFLQEIKPEAVAYITIKTTLACLTSADNTTVQAVASAIGRAIEDEARFGRIRDLEAKHFKKNVEEQLNKRVGHVYKKAFMQVVEHDMLSKGLLGGEAWSSWHKEDSIHVGVRCIEMLIESTGMVSLRRQNAGVVGQDSETIELAPEYAEAIATRAGALAGISPMFQPCVVPPKPWTGITGGGYWAAGRKPLQLVRTRSLAALRRYEEVSMPEVIKAVNIAQNTAWRINKKVLDVANTITQWQHCPVADVPAMDRGEMPARPLDIDTNPIALKAWKKEASAFYRKDKARVSRRLSMEFMLSQANKFANYEAIWFPQNMDWRGRVYAVPMFNPQGNDMTKGLLTFAQEKPIGEDGFYWLKIHGANTAGVDKVPFPQRIKFVEDNHTNIMECAKAPLENTWWAEQDSPFCFLAFCFEYAGVINSGLSYNCSLPLAFDGSCSGLQHFSAMLRDEIGGKAVNLLPSAEYQDIYRIVSDKVNEMLKQDLINGTSTTVETVTDKKTGEITQRTKYGTKVMAQWWLEHGVNRGVTKRSVMTLVYGALEFGFRDQVLSDTIQKAIDNGKGDMFLNPNQAAGYMAKLIWNAVSGTVVAAVEAMNWLKSAAKLLAAEVKDRKTDTVLRGRCAVHWVTPDGFPVWQEYKKPIQTRLNLMFLGQFRLQPTINTNKDSEIDARKQVSGIAPNFVHSLDGNHLRMTVVWAHEKYGIESFALIHDSFGTIPADAANLFKAVRETFVDTYESCDVLADFYDQIADQLHESQRDKMPALPAKGNLNLRDILKSDFAFA

SEQ ID NO: 1745 - DNA, 2670 bp, synthetic construct
  misc_feature 1..2670: note = Variant of RNA polymerase
  source 1..2670: mol_type = other DNA
atgcaccatcaccatcaccatatgaacacgattaacattgctaagaacgacttctctgacatcgaactggctgctatcccgttcaacactctggctgaccattacggtgagcgtttagctcgcgaacagttggcccttgagcatgagtcttacgagatgggtgaagcacgcttccgcaagatgtttgagcgtcaacttaaagctggtgaggttgcggataacgctgccgccaagcctctcatcactaccctactccctaagatgattgcacgcatcaacgactggtttgaggaagtgaaagctaagcgcggcaagcgcccgacagccttccagttcctgcaagaaatcaagccggaagccgtagcgtacatcaccattaagacgactctggcttgcctaaccagtgcggacaatacaaccgttcaggctgtttcgagcgcaatcggtcgggccattgaggacgaggctcgcttcggtcgtatccgtgaccttgaagctaagcacttcaagaagaacgttgaggaacaactcaacaagcgcgtagggcacgtctacaagaaagcatttatgcaagttgtcgagcacgacatgctctctaagggtctactcggtggcgaggcgtggtcttcgtggcataaggaagactctattcatgtaggagtacgctgcatcgagatgctcattgagtcaaccggaatggttagcttacaccgccaaaatgctggcgtagtaggtcaagactctgagacgatcgaactcgcacctgaatacgctgaggctatcgcaacccgtgcaggtgcgctggctggcatctctccgatgttccaaccttgcgtagttcctcctaagccgtggactggcattactggtggtggctattgggctgcggggcgcaaacccctgcagttagtacgtactcgcagtctggcggcgcttcgccgctatgaagaagtgtcgatgccggaggtcatcaaagcagtcaacattgcgcagaatacagcatggcgtattaacaagaaagttctcgacgtagcgaataccatcacccaatggcagcactgtccagtcgcggatgtgcctgcgatggatcgtggcgaaatgccagctcgtccgttggacatcgataccaacgagattgcacttaaagcgtggaagaaagaggcttccgcgttctaccgcaaagacaaagcacgcgttagccgtcgtctgtcaatggagtttatgttatctcaggcgaacaagtttgcgaattatgaggcaatctggtttccgcaaaacatggattggcgtgggcgcgtgtacgctgtcccgatgttcaatcctcagggcaacgatatgacgaaaggcctgctgacctttgcgcaggagaaacccattggtgaagacggcttctattggctcaagattcatggcgcaaatacagctggagtggataaagtaccgtttccacaacgcatcaaatttgttgaggataaccatacgaatattatggaatgcgcgaaagcaccgctggaaaacacttggtgggcggaacaggactcgccgttctgctttctggcgttctgctttgagtatgctggcgtcatcaatagtggtctgtcgtacaactgtagcttgcctctggcatttgatggtagttgctccggcctgcaacatttctcagcgatgttacgcgacgaaattggcggcaaagctgtgaatctcctcccatctgcggaataccaggatatttatcgtatcgtcagcgacaaagttaacgagatgctgaaacaagatctgattaacggtacctctaccaccgtggaaacggtgactgataagaagacaggcgaaattacccaacgcacgaaatacgggaccaaagttatggcacagtggtggttagaacacggtgtgaatcgtggcgtcacgaaacgctcggttatgactttggtgtatggggcgctggagtttggattccgcgatcaagtgctgagtgacaccattcaaaaagcgatcgataacggcaagggtgacatgtttctgaatccgaatcaggctgctggttacatggcgaaactgatctggaacgcagtgtccgggaccgtagtcgcagcagttgaggcgatgaactggctgaaaagtgcggcgaaattacttgctgctgaagtgaaggatcgtaagacggatacagttctgcgtggccgctgcgcagtacattgggtgactcccgacggcttccctgtgtggcaggaatacaagaagcctattcagacgcgcttgaacctgatgttcctcggtcagttccgcttacagcctaccattaacaccaacaaagatagcgagattgatgcacgcaaacaggtgtctggtatcgctcctaactttgtacacagcctggacggtaaccaccttcgtatgactgtagtgtgggcacacgagaagtacggaatcgaatcttttgcactgattcacgactccttcggtaccattccggctgacgctgcgaacctgttcaaagcagtgcgcgaaactttcgttgacacatatgagtcttgtgatgtactggctgatttctacgaccagattgctgaccagttgcacgagtctcaacgcgacaaaatgccagcacttccggctaaaggtaacttgaacctccgtgacatcttaaaatcggacttcgcgttcgcg

SEQ ID NO: 1746 - protein, 890 aa, synthetic construct
  REGION 1..890: note = Variant of RNA polymerase
MHHHHHHMNTINIAKNDFSDIELAAIPFNTLADHYGERLAREQLALEHESYEMGEARFRKMFERQLKAGEVADNAAAKPLITTLLPKMIARINDWFEEVKAKRGKRPTAFQFLQEIKPEAVAYITIKTTLACLTSADNTTVQAVSSAIGRAIEDEARFGRIRDLEAKHFKKNVEEQLNKRVGHVYKKAFMQVVEHDMLSKGLLGGEAWSSWHKEDSIHVGVRCIEMLIESTGMVSLHRQNAGVVGQDSETIELAPEYAEAIATRAGALAGISPMFQPCVVPPKPWTGITGGGYWAAGRKPLQLVRTRSLAALRRYEEVSMPEVIKAVNIAQNTAWRINKKVLDVANTITQWQHCPVADVPAMDRGEMPARPLDIDTNEIALKAWKKEASAFYRKDKARVSRRLSMEFMLSQANKFANYEAIWFPQNMDWRGRVYAVPMFNPQGNDMTKGLLTFAQEKPIGEDGFYWLKIHGANTAGVDKVPFPQRIKFVEDNHTNIMECAKAPLENTWWAEQDSPFCFLAFCFEYAGVINSGLSYNCSLPLAFDGSCSGLQHFSAMLRDEIGGKAVNLLPSAEYQDIYRIVSDKVNEMLKQDLINGTSTTVETVTDKKTGEITQRTKYGTKVMAQWWLEHGVNRGVTKRSVMTLVYGALEFGFRDQVLSDTIQKAIDNGKGDMFLNPNQAAGYMAKLIWNAVSGTVVAAVEAMNWLKSAAKLLAAEVKDRKTDTVLRGRCAVHWVTPDGFPVWQEYKKPIQTRLNLMFLGQFRLQPTINTNKDSEIDARKQVSGIAPNFVHSLDGNHLRMTVVWAHEKYGIESFALIHDSFGTIPADAANLFKAVRETFVDTYESCDVLADFYDQIADQLHESQRDKMPALPAKGNLNLRDILKSDFAFA

SEQ ID NO: 1747 - DNA, 2670 bp, synthetic construct
  misc_feature 1..2670: note = Variant of RNA polymerase
  source 1..2670: mol_type = other DNA
atgcaccatcaccatcaccatatgaacacgattaacattgctaagaacgacttctctgacatcgaactggctgctatcccgttcaacactctggctgaccattacggtgagcgtttagctcgcgaacagttggcccttgagcatgagtcttacgagatgggtgaagcacgcttccgcaagatgtttgagcgtcaacttaaagctggtgaggttgcggataacgctgccgccaagcctctcatcactaccctactccctaagatgattgcacgcatcaacgactggtttgaggaagtgaaagctaagcgcggcaagcgcccgacagccttccagttcctgcaagaaatcaagccggaagccgtagcgtacatcaccattaagaccactctggcttgcctaaccggcgcggacaatcgcaccgttcaggctgtagcaagcgcaatcggtcgggccattgaggacgaggctcgcttcggtcgtatccgtgaccttgaagctaagcacttcaagaagaacgttgaggaacaactcaacaagcgcgtagggcacgtctacaagaaagcatttatgcaagttgtcgagcacgacatgctctctaagggtctactcggtggcgaggcgtggtcttcgtggcataaggaagactctattcatgtaggagtacgctgcatcgagatgctcattgagtcaaccggaatggttagcttacaccgccaaaatgctggcgtagtaggtcaagactctgagactatcgaactcgcacctgaatacgctgaggctatcgcaacccgtgcaggtgcgctggctggcatctctccgatgttccaaccttgcgtagttcctcctaagccgtggactggcattactggtggtggctattgggctgcggggcgcaaacccctgcagttagtacgtactcgcagtctggcggcgcttcgccgctatgaagaagtgtcgatgccggaggtcatcaaagcagtcaacattgcgcagaatacagcatggcgtattaacaagaaagttctcgacgtagcgaataccatcacccaatggaaacactgtccagtcgctgatgtccctgcgatggatcgtggcgaaatgccagctcgtccgttggacatcgataccaacgagattgcacttaaagcgtggaagaaagaagcttccgcgttctaccgcaaagacaaagcacgcgttagccgtcgtctgtcaatggagtttatgttatctcaggcgaacaagtttgcgaattatgaggcaatctggtttccgcaaaacatggattggcgtgggcgcgtgtacgctgtcccgatgttcaatcctcagggcaacgatatgacgaaaggcctgctgacctttgcgcaggagaaacccattggtgaagacggcttctattggctcaagattcatggcgcaaatacagctggagtggataaagtaccgtttccacaacgcatcaaatttgttgaggataaccatacgaatattatggaatgcgcgaaagcaccgctggaaaacacttggtgggcggaacaggactcgccgttctgctttctggcgttctgctttgagtatgctggcgtcatcaatagtggtctgtcgtacaactgtagcttgcctctggcatttgatggtagttgctccggcctgcaacatttctcagcgatgttacgcgacgaaattggcggcaaagctgtgaatctcctcccatctgcggaataccaggatatttatcgtatcgtcagcgacaaagttaacgagatgctgaaacaagatctgattaacggtacctctaccaccgtggaaacggtgactgataagaagacaggcgaaattacccaacgcacgaaatacgggaccaaagttatggcacagtggtggttagaacacggtgtgaatcgtggcgtcacgaaacgctcggttatgactttggtgtatgggagcaaagagtttggattccgcgagcaagtgcgtagtgacaccattcaaaaagcgatcgataacggcaagggtgacatgtttctgaatccgaatcaggctgctggttacatggcgaaactgatctggaacgcagtgtccgggaccgtagtcgcagcagttgaggcgatgaactggctgaaaagtgcggcgaaattacttgctgctgaagtgaaggatcgtaagacggatacagttctgcgtggccgctgcgcagtacattgggtgactcccgacggcttccctgtgtggcaggaatacaagaagcctattcagacgcgcttgaacctgatgttcctcggtcagttccgcttacagcctaccattaacaccaacaaagatagcgagattgatgcacgcaaacaggtgtctggtatcgctcctaactttgtacacagcctggacggtaaccaccttcgtatgactgtagtgtgggcacacgagaagtacggaatcgaatcttttgcactgattcacgactccttcggtaccattccggctgacgctgcgaacctgttcaaagcagtgcgcgaaactttcgttgacacatatgagtcttgtgatgtactggctgatttctacgaccagattgctgaccagttgcacgagtctcaacgcgacaaaatgccagcacttccggctaaaggtaacttgaacctccgtgacatcttaaaatcggacttcgcgttcgcg

SEQ ID NO: 1748 - protein, 890 aa, synthetic construct
  REGION 1..890: note = Variant of RNA polymerase
MHHHHHHMNTINIAKNDFSDIELAAIPFNTLADHYGERLAREQLALEHESYEMGEARFRKMFERQLKAGEVADNAAAKPLITTLLPKMIARINDWFEEVKAKRGKRPTAFQFLQEIKPEAVAYITIKTTLACLTGADNRTVQAVASAIGRAIEDEARFGRIRDLEAKHFKKNVEEQLNKRVGHVYKKAFMQVVEHDMLSKGLLGGEAWSSWHKEDSIHVGVRCIEMLIESTGMVSLHRQNAGVVGQDSETIELAPEYAEAIATRAGALAGISPMFQPCVVPPKPWTGITGGGYWAAGRKPLQLVRTRSLAALRRYEEVSMPEVIKAVNIAQNTAWRINKKVLDVANTITQWKHCPVADVPAMDRGEMPARPLDIDTNEIALKAWKKEASAFYRKDKARVSRRLSMEFMLSQANKFANYEAIWFPQNMDWRGRVYAVPMFNPQGNDMTKGLLTFAQEKPIGEDGFYWLKIHGANTAGVDKVPFPQRIKFVEDNHTNIMECAKAPLENTWWAEQDSPFCFLAFCFEYAGVINSGLSYNCSLPLAFDGSCSGLQHFSAMLRDEIGGKAVNLLPSAEYQDIYRIVSDKVNEMLKQDLINGTSTTVETVTDKKTGEITQRTKYGTKVMAQWWLEHGVNRGVTKRSVMTLVYGSKEFGFREQVRSDTIQKAIDNGKGDMFLNPNQAAGYMAKLIWNAVSGTVVAAVEAMNWLKSAAKLLAAEVKDRKTDTVLRGRCAVHWVTPDGFPVWQEYKKPIQTRLNLMFLGQFRLQPTINTNKDSEIDARKQVSGIAPNFVHSLDGNHLRMTVVWAHEKYGIESFALIHDSFGTIPADAANLFKAVRETFVDTYESCDVLADFYDQIADQLHESQRDKMPALPAKGNLNLRDILKSDFAFA

SEQ ID NO: 1749 - DNA, 2670 bp, synthetic construct
  misc_feature 1..2670: note = Variant of RNA polymerase
  source 1..2670: mol_type = other DNA
atgcaccatcaccatcaccatatgaacacgattaacattgctaagaacgacttctctgacatcgaactggctgctatcccgttcaacactctggctgaccattacggtgagcgtttagctcgcgaacagttggcccttgagcatgagtcttacgagatgggtgaagcacgcttccgcaagatgtttgagcgtcaacttaaagctggtgaggttgcggataacgctgccgccaagcctctcatcactaccctactccctaagatgattgcacgcatcaacgactggtttgaggaagtgaaagctaagcgcggcaagcgcccgacagccttccagttcctgcaagaaatcaagccggaagccgtagcgtacatcaccattaagaccactctggcttgcctaaccggcgcggacaatcgcaccgttcaggctgtagcaagcgctatcggtcggcgtattgaggacgaggctcgcttcggtcgtatccgtgaccttgaagctaagcacttcaagaagaacgttgaggaacaactcaacaagcgcgtagggcacgtctacaagaaagcatttatgcaagttgtcgagcacgacatgctctctaagggtctactcggtggcgaggcgtggtcttcgtggcataaggaagactctattcatgtaggagtacgctgcatcgagatgctcattgagtcaaccggaatggttagcttacaccgccaaaatgctggcgtagtaggtcaagactctgagactatcgaactcgcacctgaatacgctgaggctatcgcaacccgtgcaggtgcgctggctggcatctctccgatgttccaaccttgcgtagttcctcctaagccgtggactggcattactggtggtggctattgggctgcggggcgcaaacccctgcagttagtacgtactcgcagtctggcggcgcttcgccgctatgaagaagtgtcgatgccggaggtcatcaaagcagtcaacattgcgcagaatacagcatggcgtattaacaagaaagttctcgacgtagcgaataccatcacccaatggcaacactgtccagtcgctgatgtccctgcgatggatcgtggcgaaatgccagctcgtccgttggacatcgataccaacgagattgcacttaaagcgtggaagaaagaagcttccgcgttctaccgcaaagacaaagcacgcgttagccgtcgtctgtcaatggagtttatgttatctcaggcgaacaagtttgcgaattatgaggcaatctggtttccgcaaaacatggattggcgtgggcgcgtgtacgctgtcccgatgttcaatcctcagggcaacgatatgacgaaaggcctgctgacctttgcgcaggagaaacccattggtgaagacggcttctattggctcaagattcatggcgcaaatacagctggagtggataaagtaccgtttccacaacgcatcaaatttgttgaggataaccatacgaatattatggaatgcgcgaaagcaccgctggaaaacacttggtgggcggaacaggactcgccgttctgctttctggcgttctgctttgagtatgctggcgtcatcaatagtggtctgtcgtacaactgtagcttgcctctggcatttgatggtagttgctccggcctgcaacatttctcagcgatgttacgcgacgaaattggcggcaaagctgtgaatctcctcccatctgcggaataccaggatatttatcgtatcgtcagcgacaaagttaacgagatgctgaaacaagatctgattaacggtacctctaccaccgtggaaacggtgactgataagaagacaggcgaaattacccaacgcacgaaatacgggaccaaagttatggcacagtggtggttagaacacggtgtgaatcgtggcgtcacgaaacgctcggttatgactttggtgtatgggagcaaagagtttggattccgcgatcaagtgctgagtgacaccattcaaaaagcgatcgataacggcaagggtgacatgtttctgaatccgaatcaggctgctggttacatggcgaaactgatctggaacgcagtgtccgggaccgtagtcgcagcagttgaggcgatgaactggctgaaaagtgcggcgaaattacttgctgctgaagtgaaggatcgtaagacggatacagttctgcgtggccgctgcgcagtacattgggtgactcccgacggcttccctgtgtggcaggaatacaagaagcctattcagacgcgcttgaacctgatgttcctcggtcagttccgcttacagcctaccattaacaccaacaaagatagcgagattgatgcacgcaaacaggtgtctggtatcgctcctaactttgtacacagcctggacggtaaccaccttcgtatgactgtagtgtgggcacacgagaagtacggaatcgaatcttttgcactgattcacgactccttcggtaccattccggctgacgctgcgaacctgttcaaagcagtgcgcgaaactttcgttgacacatatgagtcttgtgatgtactggctgatttctacgaccagattgctgaccagttgcacgagtctcaacgcgacaaaatgccagcacttccggctaaaggtaacttgaacctccgtgacatcttaaaatcggacttcgcgttcgcg

SEQ ID NO: 1750 - protein, 890 aa, synthetic construct
  REGION 1..890: note = Variant of RNA polymerase
MHHHHHHMNTINIAKNDFSDIELAAIPFNTLADHYGERLAREQLALEHESYEMGEARFRKMFERQLKAGEVADNAAAKPLITTLLPKMIARINDWFEEVKAKRGKRPTAFQFLQEIKPEAVAYITIKTTLACLTGADNRTVQAVASAIGRRIEDEARFGRIRDLEAKHFKKNVEEQLNKRVGHVYKKAFMQVVEHDMLSKGLLGGEAWSSWHKEDSIHVGVRCIEMLIESTGMVSLHRQNAGVVGQDSETIELAPEYAEAIATRAGALAGISPMFQPCVVPPKPWTGITGGGYWAAGRKPLQLVRTRSLAALRRYEEVSMPEVIKAVNIAQNTAWRINKKVLDVANTITQWQHCPVADVPAMDRGEMPARPLDIDTNEIALKAWKKEASAFYRKDKARVSRRLSMEFMLSQANKFANYEAIWFPQNMDWRGRVYAVPMFNPQGNDMTKGLLTFAQEKPIGEDGFYWLKIHGANTAGVDKVPFPQRIKFVEDNHTNIMECAKAPLENTWWAEQDSPFCFLAFCFEYAGVINSGLSYNCSLPLAFDGSCSGLQHFSAMLRDEIGGKAVNLLPSAEYQDIYRIVSDKVNEMLKQDLINGTSTTVETVTDKKTGEITQRTKYGTKVMAQWWLEHGVNRGVTKRSVMTLVYGSKEFGFRDQVLSDTIQKAIDNGKGDMFLNPNQAAGYMAKLIWNAVSGTVVAAVEAMNWLKSAAKLLAAEVKDRKTDTVLRGRCAVHWVTPDGFPVWQEYKKPIQTRLNLMFLGQFRLQPTINTNKDSEIDARKQVSGIAPNFVHSLDGNHLRMTVVWAHEKYGIESFALIHDSFGTIPADAANLFKAVRETFVDTYESCDVLADFYDQIADQLHESQRDKMPALPAKGNLNLRDILKSDFAFA

SEQ ID NO: 1751 - DNA, 2670 bp, synthetic construct
  misc_feature 1..2670: note = Variant of RNA polymerase
  source 1..2670: mol_type = other DNA
atgcaccatcaccatcaccatatgaacacgattaacattgctaagaacgacttctctgacatcgaactggctgctatcccgttcaacactctggctgaccattacggtgagcgtttagctcgcgaacagttggcccttgagcatgagtcttacgagatgggtgaagcacgcttccgcaagatgtttgagcgtcaacttaaagctggtgaggttgcggataacgctgccgccaagcctctcatcactaccctactccctaagatgattgcacgcatcaacgactggtttgaggaagtgaaagctaagcgcggcaagcgcccgacagccttccagttcctgcaagaaatcaagccggaagccgtagcgtacatcaccattaagaccactctggcttgcctaaccagcgcggacaatactaccgttcaggctgtagcaagcgcaatcggtcgggcaattgaggacgaggctcgcttcggtcgtatccgtgaccttgaagctaagcacttcaagaagaacgttgaggaacaactcaacaagcgcgtagggcacgtctacaagaaagcatttatgcaagttgtcgagcacgacatgctctctaagggtctactcggtggcgaggcgtggtcttcgtggcataaggaagactctattcatgtaggagtacgctgcatcgagatgctcattgagtcaaccggaatggttagcttacaccgccaaaatgctggcgtagtaggtcaagactctgagactatcgaactcgcacctgaatacgctgaggctatcgcaacccgtgcaggtgcgctggctggcatctctccgatgttccaaccttgcgtagttcctcctaagccgtggactggcattactggtggtggctattgggctgcggggcgcaaacccctgcagttagtacgtactcgcagtctgaaggcgcttcgccgctatgaagaagtgtcgatgccggaggtcatcaaagcagtcaacattgcgcagaatacagcatggcgtattaacaagaaagttctcgacgtagcgaataccatcacccaatggcagcactgtccagtcgcggatgtgcctgcgatggatcgtggcgaaatgccagctcgtccgttggacatcgataccaacgagattgcacttaaagcgtggaagaaagaagcttccgcgttctaccgcaaagacaaagcacgcgttagccgtcgtctgtcaatggagtttatgttatctcaggcgaacaagtttgcgaattatgaggcaatctggtttccgcaaaacatggattggcgtgggcgcgtgtacgctgtcccgatgttcaatcctcagggcaacgatatgacgaaaggcctgctgacctttgcgcaggagaaacccattggtgaagacggcttctattggctcaagattcatggcgcaaatacagctggagtggataaagtaccgtttccacaacgcatcaaatttgttgaggataaccatacgaatattatggaatgcgcgaaagcaccgctggaaaacacttggtgggcggaacaggactcgccgttctgctttctggcgttctgctttgagtatgctggcgtcatcaatagtggtctgtcgtacaactgtagcttgcctctggcatttgatggtagttgctccggcctgcaacatttctcagcgatgttacgcgacgaaattggcggcaaagctgtgaatctcctcccatctgcggaataccaggatatttatcgtatcgtcagcgacaaagttaacgagatgctgaaacaagatctgattaacggtacctctaccaccgtggaaacggtgactgataagaagacaggcgaaattacccaacgcacgaaatacgggaccaaagttatggcacagtggtggttagaacacggtgtgaatcgtggcgtcacgaaacgctcggttatgactttggtgtatgggagcaaagagtttggattccgcgagcaagtgaaaagtgacaccattcaaaaagcgatcgataacggcaagggtgacatgtttctgaatccgaatcaggctgctggttacatggcgaaactgatctggaacgcagtgtccgggaccgtagtcgcagcagttgaggcgatgaactggctgaaaagtgcggcgaaattacttgctgctgaagtgaaggatcgtaagacggatacagttctgcgtggccgctgcgcagtacattgggtgactcccgacggcttccctgtgtggcaggaatacaagaagcctattcagacgcgcttgaacctgatgttcctcggtcagttccgcttacagcctaccattaacaccaacaaagatagcgagattgatgcacgcaaacaggtgtctggtatcgctcctaactttgtacacagcctggacggtaaccaccttcgtatgactgtagtgtgggcacacgagaagtacggaatcgaatcttttgcactgattcacgactccttcggtaccattccggctgacgctgcgaacctgttcaaagcagtgcgcgaaactttcgttgacacatatgagtcttgtgatgtactggctgatttctacgaccagattgctgaccagttgcacgagtctcaacgcgacaaaatgccagcacttccggctaaaggtaacttgaacctccgtgacatcttaaaatcggacttcgcgttcgcg

SEQ ID NO: 1752 - protein, 890 aa, synthetic construct
  REGION 1..890: note = Variant of RNA polymerase
MHHHHHHMNTINIAKNDFSDIELAAIPFNTLADHYGERLAREQLALEHESYEMGEARFRKMFERQLKAGEVADNAAAKPLITTLLPKMIARINDWFEEVKAKRGKRPTAFQFLQEIKPEAVAYITIKTTLACLTSADNTTVQAVASAIGRAIEDEARFGRIRDLEAKHFKKNVEEQLNKRVGHVYKKAFMQVVEHDMLSKGLLGGEAWSSWHKEDSIHVGVRCIEMLIESTGMVSLHRQNAGVVGQDSETIELAPEYAEAIATRAGALAGISPMFQPCVVPPKPWTGITGGGYWAAGRKPLQLVRTRSLKALRRYEEVSMPEVIKAVNIAQNTAWRINKKVLDVANTITQWQHCPVADVPAMDRGEMPARPLDIDTNEIALKAWKKEASAFYRKDKARVSRRLSMEFMLSQANKFANYEAIWFPQNMDWRGRVYAVPMFNPQGNDMTKGLLTFAQEKPIGEDGFYWLKIHGANTAGVDKVPFPQRIKFVEDNHTNIMECAKAPLENTWWAEQDSPFCFLAFCFEYAGVINSGLSYNCSLPLAFDGSCSGLQHFSAMLRDEIGGKAVNLLPSAEYQDIYRIVSDKVNEMLKQDLINGTSTTVETVTDKKTGEITQRTKYGTKVMAQWWLEHGVNRGVTKRSVMTLVYGSKEFGFREQVKSDTIQKAIDNGKGDMFLNPNQAAGYMAKLIWNAVSGTVVAAVEAMNWLKSAAKLLAAEVKDRKTDTVLRGRCAVHWVTPDGFPVWQEYKKPIQTRLNLMFLGQFRLQPTINTNKDSEIDARKQVSGIAPNFVHSLDGNHLRMTVVWAHEKYGIESFALIHDSFGTIPADAANLFKAVRETFVDTYESCDVLADFYDQIADQLHESQRDKMPALPAKGNLNLRDILKSDFAFA

SEQ ID NO: 1753 - DNA, 2670 bp, synthetic construct
  misc_feature 1..2670: note = Variant of RNA polymerase
  source 1..2670: mol_type = other DNA
atgcaccatcaccatcaccatatgaacacgattaacattgctaagaacgacttctctgacatcgaactggctgctatcccgttcaacactctggctgaccattacggtgagcgtttagctcgcgaacagttggcccttgagcatgagtcttacgagatgggtgaagcacgcttccgcaagatgtttgagcgtcaacttaaagctggtgaggttgcggataacgctgccgccaagcctctcatcactaccctactccctaagatgattgcacgcatcaacgactggtttgaggaagtgaaagctaagcgcggcaagcgcccgacagccttccagttcctgcaagaaatcaagccggaagccgtagcgtacatcaccattaagaccactctggcttgcctaaccggcgcggacaatcgcaccgttcaggctgtagcaagcgcaatcggtcgggcaattgaggacgaggctcgcttcggtcgtatccgtgaccttgaagctaagcacttcaagaagaacgttgaggaacaactcaacaagcgcgtagggcacgtctacaagaaagcatttatgcaagttgtcgagcacgacatgctctctaagggtctactcggtggcgaggcgtggtcttcgtggcataaggaagactctattcatgtaggagtacgctgcatcgagatgctcattgagtcaaccggaatggttagcttacaccgccaaaatgctggcgtagtaggtcaagactctgagactatcgaactcgcacctgaatacgctgaggctatcgcaacccgtgcaggtgcgctggctggcatctctccgatgttccaaccttgcgtagttcctcctaagccgtggactggcattactggtggtggctattgggctgcggggcgcaaacccctgcagttagtacgtactcgcagtctgtttgcgcttcgccgctatgaagaagtgtcgatgccggaggtcatcaaagcagtcaacattgcgcagaatacagcatggcgtattaacaagaaagttctcgacgtagcgaataccatcacccaatggcagcactgtccagtcgcggatgtgcctgcgatggatcgtggcgaaatgccagctcgtccgttggacatcgataccaacgagattgcacttaaagcgtggaagaaagaagcttccgcgttctaccgcaaagacaaagcacgcgttagccgtcgtctgtcaatggagtttatgttatctcaggcgaacaagtttgcgaattatgaggcaatctggtttccgcaaaacatggattggcgtgggcgcgtgtacgctgtcccgatgttcaatcctcagggcaacgatatgacgaaaggcctgctgacctttgcgcaggagaaacccattggtgaagacggcttctattggctcaagattcatggcgcaaatacagctggagtggataaagtaccgtttccacaacgcatcaaatttgttgaggataaccatacgaatattatggaatgcgcgaaagcaccgctggaaaacacttggtgggcggaacaggactcgccgttctgctttctggcgttctgctttgagtatgctggcgtcatcaatagtggtctgtcgtacaactgtagcttgcctctggcatttgatggtagttgctccggcctgcaacatttctcagcgatgttacgcgacgaaattggcggcaaagctgtgaatctcctcccatctgcggaataccaggatatttatcgtatcgtcagcgacaaagttaacgagatgctgaaacaagatctgattaacggtacctctaccaccgtggaaacggtgactgataagaagacaggcgaaattacccaacgcacgaaatacgggaccaaagttatggcacagtggtggttagaacacggtgtgaatcgtggcgtcacgaaacgctcggttatgactttggtgtatgggagcaaagagtttggattccgcgatcaagtgctgagtgacaccattcaaaaagcgatcgataacggcaagggtgacatgtttctgaatccgaatcaggctgctggttacatggcgaaactgatctggaacgcagtgtccgggaccgtagtcgcagcagttgaggcgatgaactggctgaaaagtgcggcgaaattacttgctgctgaagtgaaggatcgtaagacggatacagttctgcgtggccgctgcgcagtacattgggtgactcccgacggcttccctgtgtggcaggaatacaagaagcctattcagacgcgcttgaacctgatgttcctcggtcagttccgcttacagcctaccattaacaccaacaaagatagcgagattgatgcacgcaaacaggtgtctggtatcgctcctaactttgtacacagcctggacggtaaccaccttcgtatgactgtagtgtgggcacacgagaagtacggaatcgaatcttttgcactgattcacgactccttcggtaccattccggctgacgctgcgaacctgttcaaagcagtgcgcgaaactttcgttgacacatatgagtcttgtgatgtactggctgatttctacgaccagattgctgaccagttgcacgagtctcaacgcgacaaaatgccagcacttccggctaaaggtaacttgaacctccgtgacatcttaaaatcggacttcgcgttcgcg

SEQ ID NO: 1754 - protein, 890 aa, synthetic construct
  REGION 1..890: note = Variant of RNA polymerase
MHHHHHHMNTINIAKNDFSDIELAAIPFNTLADHYGERLAREQLALEHESYEMGEARFRKMFERQLKAGEVADNAAAKPLITTLLPKMIARINDWFEEVKAKRGKRPTAFQFLQEIKPEAVAYITIKTTLACLTGADNRTVQAVASAIGRAIEDEARFGRIRDLEAKHFKKNVEEQLNKRVGHVYKKAFMQVVEHDMLSKGLLGGEAWSSWHKEDSIHVGVRCIEMLIESTGMVSLHRQNAGVVGQDSETIELAPEYAEAIATRAGALAGISPMFQPCVVPPKPWTGITGGGYWAAGRKPLQLVRTRSLFALRRYEEVSMPEVIKAVNIAQNTAWRINKKVLDVANTITQWQHCPVADVPAMDRGEMPARPLDIDTNEIALKAWKKEASAFYRKDKARVSRRLSMEFMLSQANKFANYEAIWFPQNMDWRGRVYAVPMFNPQGNDMTKGLLTFAQEKPIGEDGFYWLKIHGANTAGVDKVPFPQRIKFVEDNHTNIMECAKAPLENTWWAEQDSPFCFLAFCFEYAGVINSGLSYNCSLPLAFDGSCSGLQHFSAMLRDEIGGKAVNLLPSAEYQDIYRIVSDKVNEMLKQDLINGTSTTVETVTDKKTGEITQRTKYGTKVMAQWWLEHGVNRGVTKRSVMTLVYGSKEFGFRDQVLSDTIQKAIDNGKGDMFLNPNQAAGYMAKLIWNAVSGTVVAAVEAMNWLKSAAKLLAAEVKDRKTDTVLRGRCAVHWVTPDGFPVWQEYKKPIQTRLNLMFLGQFRLQPTINTNKDSEIDARKQVSGIAPNFVHSLDGNHLRMTVVWAHEKYGIESFALIHDSFGTIPADAANLFKAVRETFVDTYESCDVLADFYDQIADQLHESQRDKMPALPAKGNLNLRDILKSDFAFA

SEQ ID NO: 1755 - DNA, 2670 bp, synthetic construct
  misc_feature 1..2670: note = Variant of RNA polymerase
  source 1..2670: mol_type = other DNA
atgcaccatcaccatcaccatatgaacacgattaacattgctaagaacgacttctctgacatcgaactggctgctatcccgttcaacactctggctgaccattacggtgagcgtttagctcgcgaacagttggcccttgagcatgagtcttacgagatgggtgaagcacgcttccgcaagatgtttgagcgtcaacttaaagctggtgaggttgcggataacgctgccgccaagcctctcatcactaccctactccctaagatgattgcacgcatcaacgactggtttgaggaagtgaaagctaagcgcggcaagcgcccgacagccttccagttcctgcaagaaatcaagccggaagccgtagcgtacatcaccatgaagacgactctggcttgcctaaccagtgcggacaatacaaccgttcaggctgtagcaagcgcaatcggtcgggccattgaggacgaggctcgcttcggtcgtatccgtgaccttgaagctaagcacttcaagaagaacgttgaggaacaactcaacaagcgcgtagggcacgtctacaagaaagcatttatgcaagttgtcgagcacgacatgctctctaagggtctactcggtggcgaggcgtggtcttcgtggcataaggaagactctattcatgtaggagtacgctgcatcgagatgctcattgagtcaaccggaatggttagcttacgtcgccaaaatgctggcgtagtaggtcaagactctgagacgatcgaactcgcacctgaatacgctgaggctatcgcaacccgtgcaggtgcgctggctggcatctctccgatgttccaaccttgcgtagttcctcctaagccgtggactggcattactggtggtggctattgggctgcggggcgcaaacccctgcagttagtacgtactcgcagtctggcggcgcttcgccgctatgaagaagtgtcgatgccggaggtcatcaaagcagtcaacattgcgcagaatacagcatggcgtattaacaagaaagttctcgacgtagcgaataccatcacccaatggcagcactgtccagtcgcggatgtgcctgcgatggatcgtggcgaaatgccagctcgtccgttggacatcgataccaacgagattgcacttaaagcgtggaagaaagaagcttccgcgttctaccgcaaagacaaagcacgcgttagccgtcgtctgtcaatggagtttatgttatctcaggcgaacaagtttgcgaattatgaggcaatctggtttccgcaaaacatggattggcgtgggcgcgtgtacgctgtcccgatgttcaatcctcagggcaacgatatgacgaaaggcctgctgacctttgcgcaggagaaacccattggtgaagacggcttctattggctcaagattcatggcgcaaatacagctggagtggataaagtaccgtttccacaacgcatcaaatttgttgaggataaccatacgaatattatggaatgcgcgaaagcaccgctggaaaacacttggtgggcggaacaggactcgccgttctgctttctggcgttctgctttgagtatgctggcgtcatcaatagtggtctgtcgtacaactgtagcttgcctctggcatttgatggtagttgctccggcctgcaacatttctcagcgatgttacgcgacgaaattggcggcaaagctgtgaatctcctcccatctgcggaataccaggatatttatcgtatcgtcagcgacaaagttaacgagatgctgaaacaagatctgattaacggtacctctaccaccgtggaaacggtgactgataagaagacaggcgaaattacccaacgcacgaaatacgggaccaaagttatggcacagtggtggttagaacacggtgtgaatcgtggcgtcacgaaacgctcggttatgactttggtgtatggggcgctggagtttggattccgcgatcaagtgctgagtgacaccattcaaaaagcgatcgataacggcaagggtgacatgtttctgaatccgaatcaggctgctggttacatggcgaaactgatctggaacgcagtgtccgggaccgtagtcgcagcagttgaggcgatgaactggctgaaaagtgcggcgaaattacttgctgctgaagtgaaggatcgtaagacggatacagttctgcgtggccgctgcgcagtacattgggtgactcccgacggcttccctgtgtggcaggaatacaagaagcctattcagacgcgcttgaacctgatgttcctcggtcagttccgcttacagcctaccattaacaccaacaaagatagcgagattgatgcacgcaaacaggtgtctggtatcgctcctaactttgtacacagcctggacggtaaccaccttcgtatgactgtagtgtgggcacacgagaagtacggaatcgaatcttttgcactgattcacgactccttcggtaccattccggctgacgctgcgaacctgttcaaagcagtgcgcgaaactttcgttgacacatatgagtcttgtgatgtactggctgatttctacgaccagattgctgaccagttgcacgagtctcaacgcgacaaaatgccagcacttccggctaaaggtaacttgaacctccgtgacatcttaaaatcggacttcgcgttcgcg

SEQ ID NO: 1756 - protein, 890 aa, synthetic construct
  REGION 1..890: note = Variant of RNA polymerase
MHHHHHHMNTINIAKNDFSDIELAAIPFNTLADHYGERLAREQLALEHESYEMGEARFRKMFERQLKAGEVADNAAAKPLITTLLPKMIARINDWFEEVKAKRGKRPTAFQFLQEIKPEAVAYITMKTTLACLTSADNTTVQAVASAIGRAIEDEARFGRIRDLEAKHFKKNVEEQLNKRVGHVYKKAFMQVVEHDMLSKGLLGGEAWSSWHKEDSIHVGVRCIEMLIESTGMVSLRRQNAGVVGQDSETIELAPEYAEAIATRAGALAGISPMFQPCVVPPKPWTGITGGGYWAAGRKPLQLVRTRSLAALRRYEEVSMPEVIKAVNIAQNTAWRINKKVLDVANTITQWQHCPVADVPAMDRGEMPARPLDIDTNEIALKAWKKEASAFYRKDKARVSRRLSMEFMLSQANKFANYEAIWFPQNMDWRGRVYAVPMFNPQGNDMTKGLLTFAQEKPIGEDGFYWLKIHGANTAGVDKVPFPQRIKFVEDNHTNIMECAKAPLENTWWAEQDSPFCFLAFCFEYAGVINSGLSYNCSLPLAFDGSCSGLQHFSAMLRDEIGGKAVNLLPSAEYQDIYRIVSDKVNEMLKQDLINGTSTTVETVTDKKTGEITQRTKYGTKVMAQWWLEHGVNRGVTKRSVMTLVYGALEFGFRDQVLSDTIQKAIDNGKGDMFLNPNQAAGYMAKLIWNAVSGTVVAAVEAMNWLKSAAKLLAAEVKDRKTDTVLRGRCAVHWVTPDGFPVWQEYKKPIQTRLNLMFLGQFRLQPTINTNKDSEIDARKQVSGIAPNFVHSLDGNHLRMTVVWAHEKYGIESFALIHDSFGTIPADAANLFKAVRETFVDTYESCDVLADFYDQIADQLHESQRDKMPALPAKGNLNLRDILKSDFAFA

SEQ ID NO: 1757 - DNA, 2670 bp, synthetic construct
  misc_feature 1..2670: note = Variant of RNA polymerase
  source 1..2670: mol_type = other DNA
atgcaccatcaccatcaccatatgaacacgattaacattgctaagaacgacttctctgacatcgaactggctgctatcccgttcaacactctggctgaccattacggtgagcgtttagctcgcgaacagttggcccttgagcatgagtcttacgagatgggtgaagcacgcttccgcaagatgtttgagcgtcaacttaaagctggtgaggttgcggataacgctgccgccaagcctctcatcactaccctactccctaagatgattgcacgcatcaacgactggtttgaggaagtgaaagctaagcgcggcaagcgcccgacagccttccagttcctgcaagaaatcaagccggaagccgtagcgtacatcaccattaagaccactctggcttgcctaaccggcgcggacaatactaccgttcaggctgtagcaagcgcaatcggtcgggccattgaggacgaggctcgcttcggtcgtatccgtgaccttgaagctaagcacttcaagaagaacgttgaggaacaactcaacaagcgcgtagggcacgtctacaagaaagcatttatgcaagttgtcgagcacgacatgctctctaagggtctactcggtggcgaggcgtggtcttcgtggcataaggaagactctattcatgtaggagtacgctgcatcgagatgctcattgagtcaaccggaatggttagcttacaccgccaaaatgctggcgtagtaggtcaagactctgagactatcgaactcgcacctgaatacgctgaggctatcgcaacccgtgcaggtgcgctggctggcatctctccgatgttccaaccttgcgtagttcctcctaagccgtggactggcattactggtggtggctattgggctgcggggcgcaaacccctgcagttagtacgtactcgcagtctgtttgcgcttcgccgctatgaagaagtgtcgatgccggaggtcatcaaagcagtcaacattgcgcagaatacagcatggcgtattaacaagaaagttctcgacgtagcgaataccatcacccaatggcagcactgtccagtcgcggatgtgcctgcgatggatcgtggcgaaatgccagctcgtccgttggacatcgataccaacgagattgcacttaaagcgtggaagaaagaagcttccgcgttctaccgcaaagacaaagcacgcgttagccgtcgtctgtcaatggagtttatgttatctcaggcgaacaagtttgcgaattatgaggcaatctggtttccgcaaaacatggattggcgtgggcgcgtgtacgctgtcccgatgttcaatcctcagggcaacgatatgacgaaaggcctgctgacctttgcgcaggagaaacccattggtgaagacggcttctattggctcaagattcatggcgcaaatacagctggagtggataaagtaccgtttccacaacgcatcaaatttgttgaggataaccatacgaatattatggaatgcgcgaaagcaccgctggaaaacacttggtgggcggaacaggactcgccgttctgctttctggcgttctgctttgagtatgctggcgtcatcaatagtggtctgtcgtacaactgtagcttgcctctggcatttgatggtagttgctccggcctgcaacatttctcagcgatgttacgcgacgaaattggcggcaaagctgtgaatctcctcccatctgcggaataccaggatatttatcgtatcgtcagcgacaaagttaacgagatgctgaaacaagatctgattaacggtacctctaccaccgtggaaacggtgactgataagaagacaggcgaaattacccaacgcacgaaatacgggaccaaagttatggcacagtggtggttagaacacggtgtgaatcgtggcgtcacgaaacgctcggttatgactttggtgtatgggagcaaagagtttggattccgcgagcaagtgaaaagtgacaccattcaaaaagcgatcgataacggcaagggtgacatgtttctgaatccgaatcaggctgctggttacatggcgaaactgatctggaacgcagtgtccgggaccgtagtcgcagcagttgaggcgatgaactggctgaaaagtgcggcgaaattacttgctgctgaagtgaaggatcgtaagacggatacagttctgcgtggccgctgcgcagtacattgggtgactcccgacggcttccctgtgtggcaggaatacaagaagcctattcagacgcgcttgaacctgatgttcctcggtcagttccgcttacagcctaccattaacaccaacaaagatagcgagattgatgcacgcaaacaggtgtctggtatcgctcctaactttgtacacagcctggacggtaaccaccttcgtatgactgtagtgtgggcacacgagaagtacggaatcgaatcttttgcactgattcacgactccttcggtaccattccggctgacgctgcgaacctgttcaaagcagtgcgcgaaactttcgttgacacatatgagtcttgtgatgtactggctgatttctacgaccagattgctgaccagttgcacgagtctcaacgcgacaaaatgccagcacttccggctaaaggtaacttgaacctccgtgacatcttaaaatcggacttcgcgttcgcg

SEQ ID NO: 1758 - protein, 890 aa, synthetic construct
  REGION 1..890: note = Variant of RNA polymerase
MHHHHHHMNTINIAKNDFSDIELAAIPFNTLADHYGERLAREQLALEHESYEMGEARFRKMFERQLKAGEVADNAAAKPLITTLLPKMIARINDWFEEVKAKRGKRPTAFQFLQEIKPEAVAYITIKTTLACLTGADNTTVQAVASAIGRAIEDEARFGRIRDLEAKHFKKNVEEQLNKRVGHVYKKAFMQVVEHDMLSKGLLGGEAWSSWHKEDSIHVGVRCIEMLIESTGMVSLHRQNAGVVGQDSETIELAPEYAEAIATRAGALAGISPMFQPCVVPPKPWTGITGGGYWAAGRKPLQLVRTRSLFALRRYEEVSMPEVIKAVNIAQNTAWRINKKVLDVANTITQWQHCPVADVPAMDRGEMPARPLDIDTNEIALKAWKKEASAFYRKDKARVSRRLSMEFMLSQANKFANYEAIWFPQNMDWRGRVYAVPMFNPQGNDMTKGLLTFAQEKPIGEDGFYWLKIHGANTAGVDKVPFPQRIKFVEDNHTNIMECAKAPLENTWWAEQDSPFCFLAFCFEYAGVINSGLSYNCSLPLAFDGSCSGLQHFSAMLRDEIGGKAVNLLPSAEYQDIYRIVSDKVNEMLKQDLINGTSTTVETVTDKKTGEITQRTKYGTKVMAQWWLEHGVNRGVTKRSVMTLVYGSKEFGFREQVKSDTIQKAIDNGKGDMFLNPNQAAGYMAKLIWNAVSGTVVAAVEAMNWLKSAAKLLAAEVKDRKTDTVLRGRCAVHWVTPDGFPVWQEYKKPIQTRLNLMFLGQFRLQPTINTNKDSEIDARKQVSGIAPNFVHSLDGNHLRMTVVWAHEKYGIESFALIHDSFGTIPADAANLFKAVRETFVDTYESCDVLADFYDQIADQLHESQRDKMPALPAKGNLNLRDILKSDFAFA

SEQ ID NO: 1759 - DNA, 2670 bp, synthetic construct
  misc_feature 1..2670: note = Variant of RNA polymerase
  source 1..2670: mol_type = other DNA
atgcaccatcaccatcaccatatgaacacgattaacattgctaagaacgacttctctgacatcgaactggctgctatcccgttcaacactctggctgaccattacggtgagcgtttagctcgcgaacagttggcccttgagcatgagtcttacgagatgggtgaagcacgcttccgcaagatgtttgagcgtcaacttaaagctggtgaggttgcggataacgctgccgccaagcctctcatcactaccctactccctaagatgattgcacgcatcaacgactggtttgaggaagtgaaagctaagcgcggcaagcgcccgacagccttccagttcctgcaagaaatcaagccggaagccgtagcgtacatcaccattaagacgactctggcttgcctaaccagtgcggacaatacaaccgttcaggctatttcgagcgcaatcggtcgggccattgaggacgaggctcgcttcggtcgtatccgtgaccttgaagctaagcacttcaagaagaacgttgaggaacaactcaacaagcgcgtagggcacgtctacaagaaagcatttatgcaagttgtcgagcacgacatgctctctaagggtctactcggtggcgaggcgtggtcttcgtggcataaggaagactctattcatgtaggagtacgctgcatcgagatgctcattgagtcaaccggaatggttagcttacatcgccaaaatgctggcgtagtaggtcaagactctgagactatcgaactcgcacctgaatacgctgaggctatcgcaacccgtgcaggtgcgctggctggcatctctccgatgttccaaccttgcgtagttcctcctaagccgtggactggcattactggtggtggctattgggctgcggggcgcaaacccctgcagttagtacgtactcgcagtctggcggcgcttcgccgctatgaagaagtgtcgatgccggaggtcatcaaagcagtcaacattgcgcagaatacagcatggcgtattaacaagaaagttctcgacgtagcgaataccatcacccaatggcaacactgtccagtcgctgatatccctgcgatggatcgtggcgaaatgccagctcgtccgttggacatcgataccaacgagattgcacttaaagcgtggaagaaagaagcttccgcgttctaccgcaaagacaaagcacgcgttagccgtcgtctgtcaatggagtttatgttatctcaggcgaacaagtttgcgaattatgaggcaatctggtttccgcaaaacatggattggcgtgggcgcgtgtacgctgtcccgatgttcaatcctcagggcaacgatatgacgaaaggcctgctgacctttgcgcaggagaaacccattggtgaagacggcttctattggctcaagattcatggcgcaaatacagctggagtggataaagtaccgtttccacaacgcatcaaatttgttgaggataaccatacgaatattatggaatgcgcgaaagcaccgctggaaaacacttggtgggcggaacaggactcgccgttctgctttctggcgttctgctttgagtatgctggcgtcatcaatagtggtctgtcgtacaactgtagcttgcctctggcatttgatggtagttgctccggcctgcaacatttctcagcgatgttacgcgacgaaattggcggcaaagctgtgaatctcctcccatctgcggaataccaggatatttatcgtatcgtcagcgacaaagttaacgagatgctgaaacaagatctgattaacggtacctctaccaccgtggaaacggtgactgataagaagacaggcgaaattacccaacgcacgaaatacgggaccaaagttatggcacagtggtggttagaacacggtgtgactcgtggcgtcacgaaacgctcggttatgactttggtgtatggggcgctggagtttggattccgcgatcaagtgctgagtgacaccattcagaaagctatcgataacggcaagggtgacatgtttctgaatccgaatcaggctgctggttacatggcgaaactgatctggaacgcagtgtccgggaccgtagtcgcagcagttgaggcgatgaactggctgaaaagtgcggcgaaattacttgctgctgaagtgaaggatcgtaagacggatacagttctgcgtggccgctgcgcagtacattgggtgactcccgacggcttccctgtgtggcaggaatacaagaagcctattcagacgcgcttgaacctgatgttcctcggtcagttccgcttacagcctaccattaacaccaacaaagatagcgagattgatgcacgcaaacaggtgtctggtatcgctcctaactttgtacacagcctggacggtaaccaccttcgtatgactgtagtgtgggcacacgagaagtacggaatcgaatcttttgcactgattcacgactccttcggtaccattccggctgacgctgcgaacctgttcaaagcagtgcgcgaaactttcgttgacacatatgagtcttgtgatgtactggctgatttctacgaccagattgctgaccagttgcacgagtctcaacgcgacaaaatgccagcacttccggctaaaggtaacttgaacctccgtgacatcttaaaatcggacttcgcgttcgcg

SEQ ID NO: 1760 - protein, 890 aa, synthetic construct
  REGION 1..890: note = Variant of RNA polymerase
MHHHHHHMNTINIAKNDFSDIELAAIPFNTLADHYGERLAREQLALEHESYEMGEARFRKMFERQLKAGEVADNAAAKPLITTLLPKMIARINDWFEEVKAKRGKRPTAFQFLQEIKPEAVAYITIKTTLACLTSADNTTVQAISSAIGRAIEDEARFGRIRDLEAKHFKKNVEEQLNKRVGHVYKKAFMQVVEHDMLSKGLLGGEAWSSWHKEDSIHVGVRCIEMLIESTGMVSLHRQNAGVVGQDSETIELAPEYAEAIATRAGALAGISPMFQPCVVPPKPWTGITGGGYWAAGRKPLQLVRTRSLAALRRYEEVSMPEVIKAVNIAQNTAWRINKKVLDVANTITQWQHCPVADIPAMDRGEMPARPLDIDTNEIALKAWKKEASAFYRKDKARVSRRLSMEFMLSQANKFANYEAIWFPQNMDWRGRVYAVPMFNPQGNDMTKGLLTFAQEKPIGEDGFYWLKIHGANTAGVDKVPFPQRIKFVEDNHTNIMECAKAPLENTWWAEQDSPFCFLAFCFEYAGVINSGLSYNCSLPLAFDGSCSGLQHFSAMLRDEIGGKAVNLLPSAEYQDIYRIVSDKVNEMLKQDLINGTSTTVETVTDKKTGEITQRTKYGTKVMAQWWLEHGVTRGVTKRSVMTLVYGALEFGFRDQVLSDTIQKAIDNGKGDMFLNPNQAAGYMAKLIWNAVSGTVVAAVEAMNWLKSAAKLLAAEVKDRKTDTVLRGRCAVHWVTPDGFPVWQEYKKPIQTRLNLMFLGQFRLQPTINTNKDSEIDARKQVSGIAPNFVHSLDGNHLRMTVVWAHEKYGIESFALIHDSFGTIPADAANLFKAVRETFVDTYESCDVLADFYDQIADQLHESQRDKMPALPAKGNLNLRDILKSDFAFA

SEQ ID NO: 1761 - DNA, 2670 bp, synthetic construct
  misc_feature 1..2670: note = Variant of RNA polymerase
  source 1..2670: mol_type = other DNA
atgcaccatcaccatcaccatatgaacacgattaacattgctaagaacgacttctctgacatcgaactggctgctatcccgttcaacactctggctgaccattacggtgagcgtttagctcgcgaacagttggcccttgagcatgagtcttacgagatgggtgaagcacgcttccgcaagatgtttgagcgtcaacttaaagctggtgaggttgcggataacgctgccgccaagcctctcatcactaccctactccctaagatgattgcacgcatcaacgactggtttgaggaagtgaaagctaagcgcggcaagcgcccgacagccttccagttcctgcaagaaatcaagccggaagccgtagcgtacatcaccattaagaccactctggcttgcctaaccagtgcggacaatacaaccgttcaggctgtagcaagcgctatcggtcggcgtattgaggacgaggctcgcttcggtcgtatccgtgaccttgaagctaagcacttcaagaagaacgttgaggaacaactcaacaagcgcgtagggcacgtctacaagaaagcatttatgcaagttgtcgagcacgacatgctctctaagggtctactcggtggcgaggcgtggtcttcgtggcataaggaagactctattcatgtaggagtacgctgcatcgagatgctcattgagtcaaccggaatggttagcttacaccgccaaaatgctggcgtagtaggtcaagactctgagactatcgaactcgcacctgaatacgctgaggctatcgcaacccgtgcaggtgcgctggctggcatctctccgatgttccaaccttgcgtagttcctcctaagccgtggactggcattactggtggtggctattgggctgcggggcgcaaacccctgcagttagtacgtactcgcagtctgtttgcgcttcgccgctatgaagaagtgtcgatgccggaggtcatcaaagcagtcaacattgcgcagaatacagcatggcgtattaacaagaaagttctcgacgtagcgaataccatcacccaatggcagcactgtccagtcgcggatgtgcctgcgatggatcgtggcgaaatgccagctcgtccgttggacatcgataccaacgagattgcacttaaagcgtggaagaaagaagcttccgcgttctaccgcaaagacaaagcacgcgttagccgtcgtctgtcaatggagtttatgttatctcaggcgaacaagtttgcgaattatgaggcaatctggtttccgcaaaacatggattggcgtgggcgcgtgtacgctgtcccgatgttcaatcctcagggcaacgatatgacgaaaggcctgctgacctttgcgcaggagaaacccattggtgaagacggcttctattggctcaagattcatggcgcaaatacagctggagtggataaagtaccgtttccacaacgcatcaaatttgttgaggataaccatacgaatattatggaatgcgcgaaagcaccgctggaaaacacttggtgggcggaacaggactcgccgttctgctttctggcgttctgctttgagtatgctggcgtcatcaatagtggtctgtcgtacaactgtagcttgcctctggcatttgatggtagttgctccggcctgcaacatttctcagcgatgttacgcgacgaaattggcggcaaagctgtgaatctcctcccatctgcggaataccaggatatttatcgtatcgtcagcgacaaagttaacgagatgctgaaacaagatctgattaacggtacctctaccaccgtggaaacggtgactgataagaagacaggcgaaattacccaacgcacgaaatacgggaccaaagttatggcacagtggtggttagaacacggtgtgaatcgtggcgtcacgaaacgctcggttatgactttggtgtatgggagcaaagagtttggattccgcgagcaagtgcgtagtgacaccattcaaaaagcgatcgataacggcaagggtgacatgtttctgaatccgaatcaggctgctggttacatggcgaaactgatctggaacgcagtgtccgggaccgtagtcgcagcagttgaggcgatgaactggctgaaaagtgcggcgaaattacttgctgctgaagtgaaggatcgtaagacggatacagttctgcgtggccgctgcgcagtacattgggtgactcccgacggcttccctgtgtggcaggaatacaagaagcctattcagacgcgcttgaacctgatgttcctcggtcagttccgcttacagcctaccattaacaccaacaaagatagcgagattgatgcacgcaaacaggtgtctggtatcgctcctaactttgtacacagcctggacggtaaccaccttcgtatgactgtagtgtgggcacacgagaagtacggaatcgaatcttttgcactgattcacgactccttcggtaccattccggctgacgctgcgaacctgttcaaagcagtgcgcgaaactttcgttgacacatatgagtcttgtgatgtactggctgatttctacgaccagattgctgaccagttgcacgagtctcaacgcgacaaaatgccagcacttccggctaaaggtaacttgaacctccgtgacatcttaaaatcggacttcgcgttcgcg

SEQ ID NO: 1762 - protein, 890 aa, synthetic construct
  REGION 1..890: note = Variant of RNA polymerase
MHHHHHHMNTINIAKNDFSDIELAAIPFNTLADHYGERLAREQLALEHESYEMGEARFRKMFERQLKAGEVADNAAAKPLITTLLPKMIARINDWFEEVKAKRGKRPTAFQFLQEIKPEAVAYITIKTTLACLTSADNTTVQAVASAIGRRIEDEARFGRIRDLEAKHFKKNVEEQLNKRVGHVYKKAFMQVVEHDMLSKGLLGGEAWSSWHKEDSIHVGVRCIEMLIESTGMVSLHRQNAGVVGQDSETIELAPEYAEAIATRAGALAGISPMFQPCVVPPKPWTGITGGGYWAAGRKPLQLVRTRSLFALRRYEEVSMPEVIKAVNIAQNTAWRINKKVLDVANTITQWQHCPVADVPAMDRGEMPARPLDIDTNEIALKAWKKEASAFYRKDKARVSRRLSMEFMLSQANKFANYEAIWFPQNMDWRGRVYAVPMFNPQGNDMTKGLLTFAQEKPIGEDGFYWLKIHGANTAGVDKVPFPQRIKFVEDNHTNIMECAKAPLENTWWAEQDSPFCFLAFCFEYAGVINSGLSYNCSLPLAFDGSCSGLQHFSAMLRDEIGGKAVNLLPSAEYQDIYRIVSDKVNEMLKQDLINGTSTTVETVTDKKTGEITQRTKYGTKVMAQWWLEHGVNRGVTKRSVMTLVYGSKEFGFREQVRSDTIQKAIDNGKGDMFLNPNQAAGYMAKLIWNAVSGTVVAAVEAMNWLKSAAKLLAAEVKDRKTDTVLRGRCAVHWVTPDGFPVWQEYKKPIQTRLNLMFLGQFRLQPTINTNKDSEIDARKQVSGIAPNFVHSLDGNHLRMTVVWAHEKYGIESFALIHDSFGTIPADAANLFKAVRETFVDTYESCDVLADFYDQIADQLHESQRDKMPALPAKGNLNLRDILKSDFAFA

SEQ ID NO: 1763 - DNA, 2670 bp, synthetic construct
  misc_feature 1..2670: note = Variant of RNA polymerase
  source 1..2670: mol_type = other DNA
atgcaccatcaccatcaccatatgaacacgattaacattgctaagaacgacttctctgacatcgaactggctgctatcccgttcaacactctggctgaccattacggtgagcgtttagctcgcgaacagttggcccttgagcatgagtcttacgagatgggtgaagcacgcttccgcaagatgtttgagcgtcaacttaaagctggtgaggttgcggataacgctgccgccaagcctctcatcactaccctactccctaagatgattgcacgcatcaacgactggtttgaggaagtgaaagctaagcgcggcaagcgcccgacagccttccagttcctgcaagaaatcaagccggaagccgtagcgtacatcaccattaagacgactctggcttgcctaaccagtgcggacaatacaaccgttcaggctgttgcgagcgcaatcggtcgggccattgaggacgaggctcgcttcggtcgtatccgtgaccttgaagctaagcacttcaagaagaacgttgaggaacaactcaacaagcgcgtagggcacgtctacaagaaagcatttatgcaagttgtcgagcacgacatgctctctaagggtctactcggtggcgaggcgtggtcttcgtggcataaggaagactctattcatgtaggagtacgctgcatcgagatgctcattgagtcaaccggaatggttagcttacgtcgccaaaatgctggcgtagtaggtcaagactctgagcgtatcgaactcgcacctgaatacgctgaggctatcgcaacccgtgcaggtgcgctggctggcatctctccgatgttccaaccttgcgtagttcctcctaagccgtggactggcattactggtggtggctattgggctgcggggcgcaaacccctgcagttagtacgtactcgcggtctggcggcgcttcgccgctatgaagaagtgtcgatgccggaggtcatcaaagcagtcaacattgcgcagaatacagcatggcgtattaacaagaaagttctcgacgtagcgaataccatcacccaatggcagcactgtccagtcgcggatgtgcctgcgatggatcgtggcgaaatgccagctcgtccgttggacatcgataccaacccgattgcacttaaagcgtggaagaaagaagcttccgcgttctaccgcaaagacaaagcacgcgttagccgtcgtctgtcaatggagtttatgttatctcaggcgaacaagtttgcgaattatgaggcaatctggtttccgcaaaacatggattggcgtgggcgcgtgtacgctgtcccgatgttcaatcctcagggcaacgatatgacgaaaggcctgctgacctttgcgcaggagaaacccattggtgaagacggcttctattggctcaagattcatggcgcaaatacagctggagtggataaagtaccgtttccacaacgcatcaaatttgttgaggataaccatacgaatattatggaatgcgcgaaagcaccgctggaaaacacttggtgggcggaacaggactcgccgttctgctttctggcgttctgctttgagtatgctggcgtcatcaatagtggtctgtcgtacaactgtagcttgcctctggcatttgatggtagttgctccggcctgcaacatttctcagcgatgttacgcgacgaaattggcggcaaagctgtgaatctcctcccatctgcggaataccaggatatttatcgtatcgtcagcgacaaagttaacgagatgctgaaacaagatctgattaacggtacctctaccaccgtggaaacggtgactgataagaagacaggcgaaattacccaacgcacgaaatacgggaccaaagttatggcacagtggtggttagaacacggtgtgactcgtggcgtcacgaaacgctcggttatgactttggtgtatggggcgctggagtttggattccgcgatcaagtgctgagtgacaccattctgaaagctatcgataacggcaagggtgacatgtttctgaatccgaatcaggctgctggttacatggcgaaactgatctggaacgcagtgtccgggaccgtagtcgcagcagttgaggcgatgaactggctgaaaagtgcggcgaaattacttgctgctgaagtgaaggatcgtaagacggatacagttctgcgtggccgctgcgcagtacattgggtgactcccgacggcttccctgtgtggcaggaatacaagaagcctattcagacgcgcttgaacctgatgttcctcggtcagttccgcttacagcctaccattaacaccaacaaagatagcgagattgatgcacgcaaacaggtgtctggtatcgctcctaactttgtacacagcctggacggtaaccaccttcgtatgactgtagtgtgggcacacgagaagtacggaatcgaatcttttgcactgattcacgactccttcggtaccattccggctgacgctgcgaacctgttcaaagcagtgcgcgaaactttcgttgacacatatgagtcttgtgatgtactggctgatttctacgaccagattgctgaccagttgcacgagtctcaacgcgacaaaatgccagcacttccggctaaaggtaacttgaacctccgtgacatcttaaaatcggacttcgcgttcgcg

SEQ ID NO: 1764 - protein, 890 aa, synthetic construct
  REGION 1..890: note = Variant of RNA polymerase
MHHHHHHMNTINIAKNDFSDIELAAIPFNTLADHYGERLAREQLALEHESYEMGEARFRKMFERQLKAGEVADNAAAKPLITTLLPKMIARINDWFEEVKAKRGKRPTAFQFLQEIKPEAVAYITIKTTLACLTSADNTTVQAVASAIGRAIEDEARFGRIRDLEAKHFKKNVEEQLNKRVGHVYKKAFMQVVEHDMLSKGLLGGEAWSSWHKEDSIHVGVRCIEMLIESTGMVSLRRQNAGVVGQDSERIELAPEYAEAIATRAGALAGISPMFQPCVVPPKPWTGITGGGYWAAGRKPLQLVRTRGLAALRRYEEVSMPEVIKAVNIAQNTAWRINKKVLDVANTITQWQHCPVADVPAMDRGEMPARPLDIDTNPIALKAWKKEASAFYRKDKARVSRRLSMEFMLSQANKFANYEAIWFPQNMDWRGRVYAVPMFNPQGNDMTKGLLTFAQEKPIGEDGFYWLKIHGANTAGVDKVPFPQRIKFVEDNHTNIMECAKAPLENTWWAEQDSPFCFLAFCFEYAGVINSGLSYNCSLPLAFDGSCSGLQHFSAMLRDEIGGKAVNLLPSAEYQDIYRIVSDKVNEMLKQDLINGTSTTVETVTDKKTGEITQRTKYGTKVMAQWWLEHGVTRGVTKRSVMTLVYGALEFGFRDQVLSDTILKAIDNGKGDMFLNPNQAAGYMAKLIWNAVSGTVVAAVEAMNWLKSAAKLLAAEVKDRKTDTVLRGRCAVHWVTPDGFPVWQEYKKPIQTRLNLMFLGQFRLQPTINTNKDSEIDARKQVSGIAPNFVHSLDGNHLRMTVVWAHEKYGIESFALIHDSFGTIPADAANLFKAVRETFVDTYESCDVLADFYDQIADQLHESQRDKMPALPAKGNLNLRDILKSDFAFA

SEQ ID NO: 1765 - DNA, 2670 bp, synthetic construct
  misc_feature 1..2670: note = Variant of RNA polymerase
  source 1..2670: mol_type = other DNA
atgcaccatcaccatcaccatatgaacacgattaacattgctaagaacgacttctctgacatcgaactggctgctatcccgttcaacactctggctgaccattacggtgagcgtttagctcgcgaacagttggcccttgagcatgagtcttacgagatgggtgaagcacgcttccgcaagatgtttgagcgtcaacttaaagctggtgaggttgcggataacgctgccgccaagcctctcatcactaccctactccctaagatgattgcacgcatcaacgactggtttgaggaagtgaaagctaagcgcggcaagcgcccgacagccttccagttcctgcaagaaatcaagccggaagccgtagcgtacatcaccattaagacgactctggcttgcctaaccagtgcggacaatacaaccgttcaggctgtagcgagcgcaatcggtcgggccattgaggacgaggctcgcttcggtcgtatccgtgaccttgaagctaagcacttcaagaagaacgttgaggaacaactcaacaagcgcgtagggcacgtctacaagaaagcatttatgcaagttgtcgagcacgacatgctctctaagggtctactcggtggcgaggcgtggtcttcgtggcataaggaagactctattcatgtaggagtacgctgcatcgagatgctcattgagtcaaccggaatggttagcttacaccgccaaaatgctggcgtagtaggtcaagactctgagcgtatcgaactcgcacctgaatacgctgaggctatcgcaacccgtgcaggtgcgctggctggcatctctccgatgttccaaccttgcgtagttcctcctaagccgtggactggcattactggtggtggctattgggctgcggggcgcaaacccctgcagttagtacgtactcgcagtctgtttgcgcttcgccgctatgaagaagtgtcgatgccggaggtcatcaaagcagtcaacattgcgcagaatacagcatggcgtattaacaagaaagttctcgacgtagcgaataccatcacccaatggcagcactgtccagtcgcggatgtgcctgcgatggatcgtggcgaaatgccagctcgtccgttggacatcgataccaacgagattgcacttaaagcgtggaagaaagaagcttccgcgttctaccgcaaagacaaagcacgcgttagccgtcgtctgtcaatggagtttatgttatctcaggcgaacaagtttgcgaattatgaggcaatctggtttccgcaaaacatggattggcgtgggcgcgtgtacgctgtcccgatgttcaatcctcagggcaacgatatgacgaaaggcctgctgacctttgcgcaggagaaacccattggtgaagacggcttctattggctcaagattcatggcgcaaatacagctggagtggataaagtaccgtttccacaacgcatcaaatttgttgaggataaccatacgaatattatggaatgcgcgaaagcaccgctggaaaacacttggtgggcggaacaggactcgccgttctgctttctggcgttctgctttgagtatgctggcgtcatcaatagtggtctgtcgtacaactgtagcttgcctctggcatttgatggtagttgctccggcctgcaacatttctcagcgatgttacgcgacgaaattggcggcaaagctgtgaatctcctcccatctgcggaataccaggatatttatcgtatcgtcagcgacaaagttaacgagatgctgaaacaagatctgattaacggtacctctaccaccgtggaaacggtgactgataagaagacaggcgaaattacccaacgcacgaaatacgggaccaaagttatggcacagtggtggttagaacacggtgtgactcgtggcgtcacgaaacgctcggttatgactttggtgtatgggagcaaagagtttggattccgcgatcaagtgctgagtgacaccattcaaaaagcgatcgataacggcaagggtgacatgtttctgaatccgaatcaggctgctggttacatggcgaaactgatctggaacgcagtgtccgggaccgtagtcgcagcagttgaggcgatgaactggctgaaaagtgcggcgaaattacttgctgctgaagtgaaggatcgtaagacggatacagttctgcgtggccgctgcgcagtacattgggtgactcccgacggcttccctgtgtggcaggaatacaagaagcctattcagacgcgcttgaacctgatgttcctcggtcagttccgcttacagcctaccattaacaccaacaaagatagcgagattgatgcacgcaaacaggtgtctggtatcgctcctaactttgtacacagcctggacggtaaccaccttcgtatgactgtagtgtgggcacacgagaagtacggaatcgaatcttttgcactgattcacgactccttcggtaccattccggctgacgctgcgaacctgttcaaagcagtgcgcgaaactttcgttgacacatatgagtcttgtgatgtactggctgatttctacgaccagattgctgaccagttgcacgagtctcaacgcgacaaaatgccagcacttccggctaaaggtaacttgaacctccgtgacatcttaaaatcggacttcgcgttcgcg

SEQ ID NO: 1766 - protein, 890 aa, synthetic construct
  REGION 1..890: note = Variant of RNA polymerase
MHHHHHHMNTINIAKNDFSDIELAAIPFNTLADHYGERLAREQLALEHESYEMGEARFRKMFERQLKAGEVADNAAAKPLITTLLPKMIARINDWFEEVKAKRGKRPTAFQFLQEIKPEAVAYITIKTTLACLTSADNTTVQAVASAIGRAIEDEARFGRIRDLEAKHFKKNVEEQLNKRVGHVYKKAFMQVVEHDMLSKGLLGGEAWSSWHKEDSIHVGVRCIEMLIESTGMVSLHRQNAGVVGQDSERIELAPEYAEAIATRAGALAGISPMFQPCVVPPKPWTGITGGGYWAAGRKPLQLVRTRSLFALRRYEEVSMPEVIKAVNIAQNTAWRINKKVLDVANTITQWQHCPVADVPAMDRGEMPARPLDIDTNEIALKAWKKEASAFYRKDKARVSRRLSMEFMLSQANKFANYEAIWFPQNMDWRGRVYAVPMFNPQGNDMTKGLLTFAQEKPIGEDGFYWLKIHGANTAGVDKVPFPQRIKFVEDNHTNIMECAKAPLENTWWAEQDSPFCFLAFCFEYAGVINSGLSYNCSLPLAFDGSCSGLQHFSAMLRDEIGGKAVNLLPSAEYQDIYRIVSDKVNEMLKQDLINGTSTTVETVTDKKTGEITQRTKYGTKVMAQWWLEHGVTRGVTKRSVMTLVYGSKEFGFRDQVLSDTIQKAIDNGKGDMFLNPNQAAGYMAKLIWNAVSGTVVAAVEAMNWLKSAAKLLAAEVKDRKTDTVLRGRCAVHWVTPDGFPVWQEYKKPIQTRLNLMFLGQFRLQPTINTNKDSEIDARKQVSGIAPNFVHSLDGNHLRMTVVWAHEKYGIESFALIHDSFGTIPADAANLFKAVRETFVDTYESCDVLADFYDQIADQLHESQRDKMPALPAKGNLNLRDILKSDFAFA

SEQ ID NO: 1767 - DNA, 2670 bp, synthetic construct
  misc_feature 1..2670: note = Variant of RNA polymerase
  source 1..2670: mol_type = other DNA
atgcaccatcaccatcaccatatgaacacgattaacattgctaagaacgacttctctgacatcgaactggctgctatcccgttcaacactctggctgaccattacggtgagcgtttagctcgcgaacagttggcccttgagcatgagtcttacgagatgggtgaagcacgcttccgcaagatgtttgagcgtcaacttaaagctggtgaggttgcggataacgctgccgccaagcctctcatcactaccctactccctaagatgattgcacgcatcaacgactggtttgaggaagtgaaagctaagcgcggcaagcgcccgacagccttccagttcctgcaagaaatcaagccggaagccgtagcgtacatcaccattaagaccactctggcttgcctaaccagtgcggacaatacaaccgttcaggctgtagcaagcgcaatcggtcgggccattgaggacgaggctcgcttcggtcgtatccgtgaccttgaagctaagcacttcaagaagaacgttgaggaacaactcaacaagcgcgtagggcacgtctacaagaaagcatttatgcaagttgtcgagcacgacatgctctctaagggtctactcggtggcgaggcgtggtcttcgtggcataaggaagactctattcatgtaggagtacgctgcatcgagatgctcattgagtcaaccggaatggttagcttacaccgccaaaatgctggcgtagtaggtcaagactctgagactatcgaactcgcacctgaatacgctgaggctatcgcaacccgtgcaggtgcgctggctggcatctctccgatgttccaaccttgcgtagttcctcctaagccgtggactggcattactggtggtggctattgggctgcggggcgcaaacccctgcagttagtacgtactcgcggtctggaggcgcttcgccgctatgaagaagtgtcgatgccggaggtcatcaaagcagtcaacattgcgcagaatacagcatggcgtattaacaagaaagttctcgacgtagcgaataccatcacccaatggcagcactgtccagtcgcggatgtgcctgcgatggatcgtggcgaaatgccagctcgtccgttggacatcgataccaacgagattgcacttaaagcgtggaagaaagaggcttccgcgttctaccgcaaagacaaagcacgcgttagccgtcgtctgtcaatggagtttatgttatctcaggcgaacaagtttgcgaattatgaggcaatctggtttccgcaaaacatggattggcgtgggcgcgtgtacgctgtcccgatgttcaatcctcagggcaacgatatgacgaaaggcctgctgacctttgcgcaggagaaacccattggtgaagacggcttctattggctcaagattcatggcgcaaatacagctggagtggataaagtaccgtttccacaacgcatcaaatttgttgaggataaccatacgaatattatggaatgcgcgaaagcaccgctggaaaacacttggtgggcggaacaggactcgccgttctgctttctggcgttctgctttgagtatgctggcgtcatcaatagtggtctgtcgtacaactgtagcttgcctctggcatttgatggtagttgctccggcctgcaacatttctcagcgatgttacgcgacgaaattggcggcaaagctgtgaatctcctcccatctgcggaataccaggatatttatcgtatcgtcagcgacaaagttaacgagatgctgaaacaagatctgattaacggtacctctaccaccgtggaaacggtgactgataagaagacaggcgaaattacccaacgcacgaaatacgggaccaaagttatggcacagtggtggttagaacacggtgtgactcgtggcgtcacgaaacgctcggttatgactttggtgtatgggagcaaagagtttggattccgcgagcaagtgctgagtgacaccattcaaaaagcgatcgataacggcaagggtgacatgtttctgaatccgaatcaggctgctggttacatggcgaaactgatctggaacgcagtgtccgggaccgtagtcgcagcagttgaggcgatgaactggctgaaaagtgcggcgaaattacttgctgctgaagtgaaggatcgtaagacggatacaatcctgcgtggccgctgcgcagtacattgggtgactcccgacggcttccctgtgtggcaggaatacaagaagcctattcagacgcgcttgaacctgatgttcctcggtcagttccgcttacagcctaccattaacaccaacaaagatagcgagattgatgcacgcaaacaggtgtctggtatcgctcctaactttgtacacagcctggacggtaaccaccttcgtatgactgtagtgtgggcacacgagaagtacggaatcgaatcttttgcactgattcacgactccttcggtaccattccggctgacgctgcgaacctgttcaaagcagtgcgcgaaactttcgttgacacatatgagtcttgtgatgtactggctgatttctacgaccagattgctgaccagttgcacgagtctcaacgcgacaaaatgccagcacttccggctaaaggtaacttgaacctccgtgacatcttaaaatcggacttcgcgttcgcg

SEQ ID NO: 1768 - protein, 890 aa, synthetic construct
  REGION 1..890: note = Variant of RNA polymerase
MHHHHHHMNTINIAKNDFSDIELAAIPFNTLADHYGERLAREQLALEHESYEMGEARFRKMFERQLKAGEVADNAAAKPLITTLLPKMIARINDWFEEVKAKRGKRPTAFQFLQEIKPEAVAYITIKTTLACLTSADNTTVQAVASAIGRAIEDEARFGRIRDLEAKHFKKNVEEQLNKRVGHVYKKAFMQVVEHDMLSKGLLGGEAWSSWHKEDSIHVGVRCIEMLIESTGMVSLHRQNAGVVGQDSETIELAPEYAEAIATRAGALAGISPMFQPCVVPPKPWTGITGGGYWAAGRKPLQLVRTRGLEALRRYEEVSMPEVIKAVNIAQNTAWRINKKVLDVANTITQWQHCPVADVPAMDRGEMPARPLDIDTNEIALKAWKKEASAFYRKDKARVSRRLSMEFMLSQANKFANYEAIWFPQNMDWRGRVYAVPMFNPQGNDMTKGLLTFAQEKPIGEDGFYWLKIHGANTAGVDKVPFPQRIKFVEDNHTNIMECAKAPLENTWWAEQDSPFCFLAFCFEYAGVINSGLSYNCSLPLAFDGSCSGLQHFSAMLRDEIGGKAVNLLPSAEYQDIYRIVSDKVNEMLKQDLINGTSTTVETVTDKKTGEITQRTKYGTKVMAQWWLEHGVTRGVTKRSVMTLVYGSKEFGFREQVLSDTIQKAIDNGKGDMFLNPNQAAGYMAKLIWNAVSGTVVAAVEAMNWLKSAAKLLAAEVKDRKTDTILRGRCAVHWVTPDGFPVWQEYKKPIQTRLNLMFLGQFRLQPTINTNKDSEIDARKQVSGIAPNFVHSLDGNHLRMTVVWAHEKYGIESFALIHDSFGTIPADAANLFKAVRETFVDTYESCDVLADFYDQIADQLHESQRDKMPALPAKGNLNLRDILKSDFAFA

SEQ ID NO: 1769 - DNA, 2670 bp, synthetic construct
  misc_feature 1..2670: note = Variant of RNA polymerase
  source 1..2670: mol_type = other DNA
atgcaccatcaccatcaccatatgaacacgattaacattgctaagaacgacttctctgacatcgaactggctgctatcccgttcaacactctggctgaccattacggtgagcgtttagctcgcgaacagttggcccttgagcatgagtcttacgagatgggtgaagcacgcttccgcaagatgtttgagcgtcaacttaaagctggtgaggttgcggataacgctgccgccaagcctctcatcactaccctactccctaagatgattgcacgcatcaacgactggtttgaggaagtgaaagctaagcgcggcaagcgcccgacagccttccagttcctgcaagaaatcaagccggaagccgtagcgtacatcaccattaagacgactctggcttgcctaaccagtgcggacaatacaaccgttcaggctgtagcaagcgcaatcggtcgggccattgaggacgaggctcgcttcggtcgtatccgtgaccttgaagctaagcacttcaagaagaacgttgaggaacaactcaacaagcgcgtagggcacgtctacaagaaagcatttatgcaagttgtcgagcacgacatgctctctaagggtctactcggtggcgaggcgtggtcttcgtggcataaggaagactctattcatgtaggagtacgctgcatcgagatgctcattgagtcaaccggaatggttagcttacgtcgccaaaatgctggcgtagtaggtcaagactctgagcgtatcgaactcgcacctgaatacgctgaggctatcgcaacccgtgcaggtgcgctggctggcatctctccgatgttccaaccttgcgtagttcctcctaagccgtggactggcattactggtggtggctattgggctgcggggcgcaaacccctgcagttagtacgtactcgcagtctggcggcgcttcgccgctatgaagaagtgtcgatgccggaggtcatcaaagcagtcaacattgcgcagaatacagcatggcgtattaacaagaaagttctcgacgtagcgaataccatcacccaatggcagcactgtccagtcgcggatgtccctgcgatggatcgtggcgaaatgccagctcgtccgttggacatcgataccaacgagattgcacttaaagcgtggaagaaagaagcttccgcgttctaccgcaaagacaaagcacgcgttagccgtcgtctgtcaatggagtttatgttatctcaggcgaacaagtttgcgaattatgaggcaatctggtttccgcaaaacatggattggcgtgggcgcgtgtacgctgtcccgatgttcaatcctcagggcaacgatatgacgaaaggcctgctgacctttgcgcaggagaaacccattggtgaagacggcttctattggctcaagattcatggcgcaaatacagctggagtggataaagtaccgtttccacaacgcatcaaatttgttgaggataaccatacgaatattatggaatgcgcgaaagcaccgctggaaaacacttggtgggcggaacaggactcgccgttctgctttctggcgttctgctttgagtatgctggcgtcatcaatagtggtctgtcgtacaactgtagcttgcctctggcatttgatggtagttgctccggcctgcaacatttctcagcgatgttacgcgacgaaattggcggcaaagctgtgaatctcctcccatctgcggaataccaggatatttatcgtatcgtcagcgacaaagttaacgagatgctgaaacaagatctgattaacggtacctctaccaccgtggaaacggtgactgataagaagacaggcgaaattacccaacgcacgaaatacgggaccaaagttatggcacagtggtggttagaacacggtgtgaatcgtggcgtcacgaaacgctcggttatgactttggtgtatgggagcaaggagtttggattccgcgatcaagtgctgagtgacaccattcaaaaagcgatcgataacggcaagggtgacatgtttctgaatccgaatcaggctgctggttacatggcgaaactgatctggaacgcagtgtccgggaccgtagtcgcagcagttgaggcgatgaactggctgaaaagtgcggcgaaattacttgctgctgaagtgaaggatcgtaagacggatacagttctgcgtggccgctgcgcagtacattgggtgactcccgacggcttccctgtgtggcaggaatacaagaagcctattcagacgcgcttgaacctgatgttcctcggtcagttccgcttacagcctaccattaacaccaacaaagatagcgagattgatgcacgcaaacaggtgtctggtatcgctcctaactttgtacacagcctggacggtaaccaccttcgtatgactgtagtgtgggcacacgagaagtacggaatcgaatcttttgcactgattcacgactccttcggtaccattccggctgacgctgcgaacctgttcaaagcagtgcgcgaaactttcgttgacacatatgagtcttgtgatgtactggctgatttctacgaccagattgctgaccagttgcacgagtctcaacgcgacaaaatgccagcacttccggctaaaggtaacttgaacctccgtgacatcttaaaatcggacttcgcgttcgcg

SEQ ID NO: 1770 - protein, 890 aa, synthetic construct
  REGION 1..890: note = Variant of RNA polymerase
MHHHHHHMNTINIAKNDFSDIELAAIPFNTLADHYGERLAREQLALEHESYEMGEARFRKMFERQLKAGEVADNAAAKPLITTLLPKMIARINDWFEEVKAKRGKRPTAFQFLQEIKPEAVAYITIKTTLACLTSADNTTVQAVASAIGRAIEDEARFGRIRDLEAKHFKKNVEEQLNKRVGHVYKKAFMQVVEHDMLSKGLLGGEAWSSWHKEDSIHVGVRCIEMLIESTGMVSLRRQNAGVVGQDSERIELAPEYAEAIATRAGALAGISPMFQPCVVPPKPWTGITGGGYWAAGRKPLQLVRTRSLAALRRYEEVSMPEVIKAVNIAQNTAWRINKKVLDVANTITQWQHCPVADVPAMDRGEMPARPLDIDTNEIALKAWKKEASAFYRKDKARVSRRLSMEFMLSQANKFANYEAIWFPQNMDWRGRVYAVPMFNPQGNDMTKGLLTFAQEKPIGEDGFYWLKIHGANTAGVDKVPFPQRIKFVEDNHTNIMECAKAPLENTWWAEQDSPFCFLAFCFEYAGVINSGLSYNCSLPLAFDGSCSGLQHFSAMLRDEIGGKAVNLLPSAEYQDIYRIVSDKVNEMLKQDLINGTSTTVETVTDKKTGEITQRTKYGTKVMAQWWLEHGVNRGVTKRSVMTLVYGSKEFGFRDQVLSDTIQKAIDNGKGDMFLNPNQAAGYMAKLIWNAVSGTVVAAVEAMNWLKSAAKLLAAEVKDRKTDTVLRGRCAVHWVTPDGFPVWQEYKKPIQTRLNLMFLGQFRLQPTINTNKDSEIDARKQVSGIAPNFVHSLDGNHLRMTVVWAHEKYGIESFALIHDSFGTIPADAANLFKAVRETFVDTYESCDVLADFYDQIADQLHESQRDKMPALPAKGNLNLRDILKSDFAFA

SEQ ID NO: 1771 - DNA, 2670 bp, synthetic construct
  misc_feature 1..2670: note = Variant of RNA polymerase
  source 1..2670: mol_type = other DNA
atgcaccatcaccatcaccatatgaacacgattaacattgctaagaacgacttctctgacatcgaactggctgctatcccgttcaacactctggctgaccattacggtgagcgtttagctcgcgaacagttggcccttgagcatgagtcttacgagatgggtgaagcacgcttccgcaagatgtttgagcgtcaacttaaagctggtgaggttgcggataacgctgccgccaagcctctcatcactaccctactccctaagatgattgcacgcatcaacgactggtttgaggaagtgaaagctaagcgcggcaagcgcccgacagccttccagttcctgcaagaaatcaagccggaagccgtagcgtacatcaccattaagacgactctggcttgcctaaccagtgcggacaatacaaccgttcaggctgtagcaagcgcaatcggtcgggccattgaggacgaggctcgcttcggtcgtatccgtgaccttgaagctaagcacttcaagaagaacgttgaggaacaactcaacaagcgcgtagggcacgtctacaagaaagcatttatgcaagttgtcgagcacgacatgctctctaagggtctactcggtggcgaggcgtggtcttcgtggcataaggaagactctattcatgtaggagtacgctgcatcgagatgctcattgagtcaaccggaatggttagcttacaccgccaaaatgctggcgtagtaggtcaagactctgagactatcgaactcgcacctgaatacgctgaggctatcgcaacccgtgcaggtgcgctggctggcatctctccgatgttccaaccttgcgtagttcctcctaagccgtggactggcattactggtggtggctattgggctgcggggcgcaaacccctgcagttagtacgtactcgcagtctggcggcgcttcgccgctatgaagaagtgtcgatgccggaggtcatcaaagcagtcaacattgcgcagaatacagcatggcgtattaacaagaaagttctcgacgtagcgaataccatcacccaatggcaacactgtccagtccgtgatgtccctgcgatggatcgtggcgaaatgccagctcgtccgttggacatcgataccaacgagattgcacttaaagcgtggaagaaagaagcttccgcgttctaccgcaaagacaaagcacgcgttagccgtcgtctgtcaatggagtttatgttatctcaggcgaacaagtttgcgaattatgaggcaatctggtttccgcaaaacatggattggcgtgggcgcgtgtacgctgtcccgatgttcaatcctcagggcaacgatatgacgaaaggcctgctgacctttgcgcaggagaaacccattggtgaagacggcttctattggctcaagattcatggcgcaaatacagctggagtggataaagtaccgtttccacaacgcatcaaatttgttgaggataaccatacgaatattatggaatgcgcgaaagcaccgctggaaaacacttggtgggcggaacaggactcgccgttctgctttctggcgttctgctttgagtatgctggcgtcatcaatagtggtctgtcgtacaactgtagcttgcctctggcatttgatggtagttgctccggcctgcaacatttctcagcgatgttacgcgacgaaattggcggcaaagctgtgaatctcctcccatctgcggaataccaggatatttatcgtatcgtcagcgacaaagttaacgagatgctgaaacaagatctgattaacggtacctctaccaccgtggaaacggtgactgataagaagacaggcgaaattacccaacgcacgaaatacgggaccaaagttatggcacagtggtggttagaacacggtgtgactcgtggcgtcacgaaacgctcggttatgactttggtgtatggggcgctggagtttggattccgcgatcaagtgctgagtgacaccattcaaaaagcgatcgataacggcaagggtgacatgtttctgaatccgaatcaggctgctggttacatggcgaaactgatctggaacgcagtgtccgggaccgtagtcgcagcagttgaggcgatgaactggctgaaaagtgcggcgaaattacttgctgctgaagtgaaggatcgtaagacggatacagttctgcgtggccgctgcgcagtacattgggtgactcccgacggcttccctgtgtggcaggaatacaagaagcctattcagacgcgcttgaacctgatgttcctcggtcagttccgcttacagcctaccattaacaccaacaaagatagcgagattgatgcacgcaaacaggtgtctggtatcgctcctaactttgtacacagcctggacggtaaccaccttcgtatgactgtagtgtgggcacacgagaagtacggaatcgaatcttttgcactgattcacgactccttcggtaccattccggctgacgctgcgaacctgttcaaagcagtgcgcgaaactttcgttgacacatatgagtcttgtgatgtactggctgatttctacgaccagattgctgaccagttgcacgagtctcaacgcgacaaaatgccagcacttccggctaaaggtaacttgaacctccgtgacatcttaaaatcggacttcgcgttcgcg

SEQ ID NO: 1772 - protein, 890 aa, synthetic construct
  REGION 1..890: note = Variant of RNA polymerase
MHHHHHHMNTINIAKNDFSDIELAAIPFNTLADHYGERLAREQLALEHESYEMGEARFRKMFERQLKAGEVADNAAAKPLITTLLPKMIARINDWFEEVKAKRGKRPTAFQFLQEIKPEAVAYITIKTTLACLTSADNTTVQAVASAIGRAIEDEARFGRIRDLEAKHFKKNVEEQLNKRVGHVYKKAFMQVVEHDMLSKGLLGGEAWSSWHKEDSIHVGVRCIEMLIESTGMVSLHRQNAGVVGQDSETIELAPEYAEAIATRAGALAGISPMFQPCVVPPKPWTGITGGGYWAAGRKPLQLVRTRSLAALRRYEEVSMPEVIKAVNIAQNTAWRINKKVLDVANTITQWQHCPVRDVPAMDRGEMPARPLDIDTNEIALKAWKKEASAFYRKDKARVSRRLSMEFMLSQANKFANYEAIWFPQNMDWRGRVYAVPMFNPQGNDMTKGLLTFAQEKPIGEDGFYWLKIHGANTAGVDKVPFPQRIKFVEDNHTNIMECAKAPLENTWWAEQDSPFCFLAFCFEYAGVINSGLSYNCSLPLAFDGSCSGLQHFSAMLRDEIGGKAVNLLPSAEYQDIYRIVSDKVNEMLKQDLINGTSTTVETVTDKKTGEITQRTKYGTKVMAQWWLEHGVTRGVTKRSVMTLVYGALEFGFRDQVLSDTIQKAIDNGKGDMFLNPNQAAGYMAKLIWNAVSGTVVAAVEAMNWLKSAAKLLAAEVKDRKTDTVLRGRCAVHWVTPDGFPVWQEYKKPIQTRLNLMFLGQFRLQPTINTNKDSEIDARKQVSGIAPNFVHSLDGNHLRMTVVWAHEKYGIESFALIHDSFGTIPADAANLFKAVRETFVDTYESCDVLADFYDQIADQLHESQRDKMPALPAKGNLNLRDILKSDFAFA

SEQ ID NO: 1773 - DNA, 2670 bp, synthetic construct
  misc_feature 1..2670: note = Variant of RNA polymerase
  source 1..2670: mol_type = other DNA
atgcaccatcaccatcaccatatgaacacgattaacattgctaagaacgacttctctgacatcgaactggctgctatcccgttcaacactctggctgaccattacggtgagcgtttagctcgcgaacagttggcccttgagcatgagtcttacgagatgggtgaagcacgcttccgcaagatgtttgagcgtcaacttaaagctggtgaggttgcggataacgctgccgccaagcctctcatcactaccctactccctaagatgattgcacgcatcaacgactggtttgaggaagtgaaagctaagcgcggcaagcgcccgacagccttccagttcctgcaagaaatcaagccggaagccgtagcgtacatcaccattaagaccactctggcttgcctaaccagtgcggacaatacaaccgttcaggctgtagcaagcgcaatcggtcgggccattgaggacgaggctcgcttcggtcgtatccgtgaccttgaagctaagcacttcaagaagaacgttgaggaacaactcaacaagcgcgtagggcacgtctacaagaaagcatttatgcaagttgtcgagcacgacatgctctctaagggtctactcggtggcgaggcgtggtcttcgtggcataaggaagactctattcatgtaggagtacgctgcatcgagatgctcattgagtcaaccggaatggttagcttacaccgccaaaatgctggcgtagtaggtcaagactctgagactatcgaactcgcacctgaatacgctgaggctatcgcaacccgtgcaggtgcgctggctggcatctctccgatgttccaaccttgcgtagttcctcctaagccgtggactggcattactggtggtggctattgggctgcggggcgcaaacccctgcagttagtacgtactcgcagtctgtttgcgcttcgccgctatgaagaagtgtcgatgccggaggtcatcaaagcagtcaacattgcgcagaatacagcatggcgtattaacaagaaagttctcgacgtagcgaataccatcacccaatggaaacactgtccagtcgctgatgtccctgcgatggatcgtggcgaaatgccagctcgtccgttggacatcgataccaacgagattgcacttaaagcgtggaagaaagaggcttccgcgttctaccgcaaagacaaagcacgcgttagccgtcgtctgtcaatggagtttatgttatctcaggcgaacaagtttgcgaattatgaggcaatctggtttccgcaaaacatggattggcgtgggcgcgtgtacgctgtcccgatgttcaatcctcagggcaacgatatgacgaaaggcctgctgacctttgcgcaggagaaacccattggtgaagacggcttctattggctcaagattcatggcgcaaatacagctggagtggataaagtaccgtttccacaacgcatcaaatttgttgaggataaccatacgaatattatggaatgcgcgaaagcaccgctggaaaacacttggtgggcggaacaggactcgccgttctgctttctggcgttctgctttgagtatgctggcgtcatcaatagtggtctgtcgtacaactgtagcttgcctctggcatttgatggtagttgctccggcctgcaacatttctcagcgatgttacgcgacgaaattggcggcaaagctgtgaatctcctcccatctgcggaataccaggatatttatcgtatcgtcagcgacaaagttaacgagatgctgaaacaagatctgattaacggtacctctaccaccgtggaaacggtgactgataagaagacaggcgaaattacccaacgcacgaaatacgggaccaaagttatggcacagtggtggttagaacacggtgtgactcgtggcgtcacgaaacgctcggttatgactttggtgtatggggcgaaggagtttggattccgcgatcaagtgctgagtgacaccattcaaaaagcgatcgataacggcaagggtgacatgtttctgaatccgaatcaggctgctggttacatggcgaaactgatctggaacgcagtgtccgggaccgtagtcgcagcagttgaggcgatgaactggctgaaaagtgcggcgaaattacttgctgctgaagtgaaggatcgtaagacggatacagttctgcgtggccgctgcgcagtacattgggtgactcccgacggcttccctgtgtggcaggaatacaagaagcctattcagacgcgcttgaacctgatgttcctcggtcagttccgcttacagcctaccattaacaccaacaaagatagcgagattgatgcacgcaaacaggtgtctggtatcgctcctaactttgtacacagcctggacggtaaccaccttcgtatgactgtagtgtgggcacacgagaagtacggaatcgaatcttttgcactgattcacgactccttcggtaccattccggctgacgctgcgaacctgttcaaagcagtgcgcgaaactttcgttgacacatatgagtcttgtgatgtactggctgatttctacgaccagattgctgaccagttgcacgagtctcaacgcgacaaaatgccagcacttccggctaaaggtaacttgaacctccgtgacatcttaaaatcggacttcgcgttcgcg

SEQ ID NO: 1774 - protein, 890 aa, synthetic construct
  REGION 1..890: note = Variant of RNA polymerase
MHHHHHHMNTINIAKNDFSDIELAAIPFNTLADHYGERLAREQLALEHESYEMGEARFRKMFERQLKAGEVADNAAAKPLITTLLPKMIARINDWFEEVKAKRGKRPTAFQFLQEIKPEAVAYITIKTTLACLTSADNTTVQAVASAIGRAIEDEARFGRIRDLEAKHFKKNVEEQLNKRVGHVYKKAFMQVVEHDMLSKGLLGGEAWSSWHKEDSIHVGVRCIEMLIESTGMVSLHRQNAGVVGQDSETIELAPEYAEAIATRAGALAGISPMFQPCVVPPKPWTGITGGGYWAAGRKPLQLVRTRSLFALRRYEEVSMPEVIKAVNIAQNTAWRINKKVLDVANTITQWKHCPVADVPAMDRGEMPARPLDIDTNEIALKAWKKEASAFYRKDKARVSRRLSMEFMLSQANKFANYEAIWFPQNMDWRGRVYAVPMFNPQGNDMTKGLLTFAQEKPIGEDGFYWLKIHGANTAGVDKVPFPQRIKFVEDNHTNIMECAKAPLENTWWAEQDSPFCFLAFCFEYAGVINSGLSYNCSLPLAFDGSCSGLQHFSAMLRDEIGGKAVNLLPSAEYQDIYRIVSDKVNEMLKQDLINGTSTTVETVTDKKTGEITQRTKYGTKVMAQWWLEHGVTRGVTKRSVMTLVYGAKEFGFRDQVLSDTIQKAIDNGKGDMFLNPNQAAGYMAKLIWNAVSGTVVAAVEAMNWLKSAAKLLAAEVKDRKTDTVLRGRCAVHWVTPDGFPVWQEYKKPIQTRLNLMFLGQFRLQPTINTNKDSEIDARKQVSGIAPNFVHSLDGNHLRMTVVWAHEKYGIESFALIHDSFGTIPADAANLFKAVRETFVDTYESCDVLADFYDQIADQLHESQRDKMPALPAKGNLNLRDILKSDFAFA

SEQ ID NO: 1775 - DNA, 2670 bp, synthetic construct
  misc_feature 1..2670: note = Variant of RNA polymerase
  source 1..2670: mol_type = other DNA
atgcaccatcaccatcaccatatgaacacgattaacattgctaagaacgacttctctgacatcgaactggctgctatcccgttcaacactctggctgaccattacggtgagcgtttagctcgcgaacagttggcccttgagcatgagtcttacgagatgggtgaagcacgcttccgcaagatgtttgagcgtcaacttaaagctggtgaggttgcggataacgctgccgccaagcctctcatcactaccctactccctaagatgattgcacgcatcaacgactggtttgaggaagtgaaagctaagcgcggcaagcgcccgacagccttccagttcctgcaagaaatcaagccggaagccgtagcgtacatcaccattaagaccactctggcttgcctaaccagtgcggacaatacaaccgttcaggctgtagcaagcgcaatcggtcgggcaattgaggacgaggctcgcttcggtcgtatccgtgaccttgaagctaagcacttcaagaagaacgttgaggaacaactcaacaagcgcgtagggcacgtctacaagaaagcatttatgcaagttgtcgagcacgacatgctctctaagggtctactcggtggcgaggcgtggtcttcgtggcataaggaagactctattcatgtaggagtacgctgcatcgagatgctcattgagtcaaccggaatggttagcttacaccgccaaaatgctggcgtagtaggtcaagactctgagactatcgaactcgcacctgaatacgctgaggctatcgcaacccgtgcaggtgcgctggctggcatctctccgatgttccaaccttgcgtagttcctcctaagccgtggactggcattactggtggtggctattgggctgcggggcgcaaacccctgcagttagtacgtactcgcggtctggcggcgcttcgccgctatgaagaagtgtcgatgccggaggtcatcaaagcagtcaacattgcgcagaatacagcatggcgtattaacaagaaagttctcgacgtagcgaataccatcacccaatggcagcactgtccagtcgcggatgtgcctgcgatggatcgtggcgaaatgccagctcgtccgttggacatcgataccaacgagattgcacttaaagcgtggaagaaagaagcttccgcgttctaccgcaaagacaaagcacgcgttagccgtcgtctgtcaatggagtttatgttatctcaggcgaacaagtttgcgaattatgaggcaatctggtttccgcaaaacatggattggcgtgggcgcgtgtacgctgtcccgatgttcaatcctcagggcaacgatatgacgaaaggcctgctgacctttgcgcaggagaaacccattggtgaagacggcttctattggctcaagattcatggcgcaaatacagctggagtggataaagtaccgtttccacaacgcatcaaatttgttgaggataaccatacgaatattatggaatgcgcgaaagcaccgctggaaaacacttggtgggcggaacaggactcgccgttctgctttctggcgttctgctttgagtatgctggcgtcatcaatagtggtctgtcgtacaactgtagcttgcctctggcatttgatggtagttgctccggcctgcaacatttctcagcgatgttacgcgacgaaattggcggcaaagctgtgaatctcctcccatctgcggaataccaggatatttatcgtatcgtcagcgacaaagttaacgagatgctgaaacaagatctgattaacggtacctctaccaccgtggaaacggtgactgataagaagacaggcgaaattacccaacgcacgaaatacgggaccaaagttatggcacagtggtggttagaacacggtgtgaatcgtggcgtcacgaaacgctcggttatgactttggtgtatgggagcaaagagtttggattccgcgagcaagtgcgtagtgacaccattcaaaaagcgatcgataacggcaagggtgacatgtttctgaatccgaatcaggctgctggttacatggcgaaactgatctggaacgcagtgtccgggaccgtagtcgcagcagttgaggcgatgaactggctgaaaagtgcggcgaaattacttgctgctgaagtgaaggatcgtaagacggatacagttctgcgtggccgctgcgcagtacattgggtgactcccgacggcttccctgtgtggcaggaatacaagaagcctattcagacgcgcttgaacctgatgttcctcggtcagttccgcttacagcctaccattaacaccaacaaagatagcgagattgatgcacgcaaacaggtgtctggtatcgctcctaactttgtacacagcctggacggtaaccaccttcgtatgactgtagtgtgggcacacgagaagtacggaatcgaatcttttgcactgattcacgactccttcggtaccattccggctgacgctgcgaacctgttcaaagcagtgcgcgaaactttcgttgacacatatgagtcttgtgatgtactggctgatttctacgaccagattgctgaccagttgcacgagtctcaacgcgacaaaatgccagcacttccggctaaaggtaacttgaacctccgtgacatcttaaaatcggacttcgcgttcgcg

SEQ ID NO: 1776 - protein, 890 aa, synthetic construct
  REGION 1..890: note = Variant of RNA polymerase
MHHHHHHMNTINIAKNDFSDIELAAIPFNTLADHYGERLAREQLALEHESYEMGEARFRKMFERQLKAGEVADNAAAKPLITTLLPKMIARINDWFEEVKAKRGKRPTAFQFLQEIKPEAVAYITIKTTLACLTSADNTTVQAVASAIGRAIEDEARFGRIRDLEAKHFKKNVEEQLNKRVGHVYKKAFMQVVEHDMLSKGLLGGEAWSSWHKEDSIHVGVRCIEMLIESTGMVSLHRQNAGVVGQDSETIELAPEYAEAIATRAGALAGISPMFQPCVVPPKPWTGITGGGYWAAGRKPLQLVRTRGLAALRRYEEVSMPEVIKAVNIAQNTAWRINKKVLDVANTITQWQHCPVADVPAMDRGEMPARPLDIDTNEIALKAWKKEASAFYRKDKARVSRRLSMEFMLSQANKFANYEAIWFPQNMDWRGRVYAVPMFNPQGNDMTKGLLTFAQEKPIGEDGFYWLKIHGANTAGVDKVPFPQRIKFVEDNHTNIMECAKAPLENTWWAEQDSPFCFLAFCFEYAGVINSGLSYNCSLPLAFDGSCSGLQHFSAMLRDEIGGKAVNLLPSAEYQDIYRIVSDKVNEMLKQDLINGTSTTVETVTDKKTGEITQRTKYGTKVMAQWWLEHGVNRGVTKRSVMTLVYGSKEFGFREQVRSDTIQKAIDNGKGDMFLNPNQAAGYMAKLIWNAVSGTVVAAVEAMNWLKSAAKLLAAEVKDRKTDTVLRGRCAVHWVTPDGFPVWQEYKKPIQTRLNLMFLGQFRLQPTINTNKDSEIDARKQVSGIAPNFVHSLDGNHLRMTVVWAHEKYGIESFALIHDSFGTIPADAANLFKAVRETFVDTYESCDVLADFYDQIADQLHESQRDKMPALPAKGNLNLRDILKSDFAFA

SEQ ID NO: 1777 - DNA, 2670 bp, synthetic construct
  misc_feature 1..2670: note = Variant of RNA polymerase
  source 1..2670: mol_type = other DNA
atgcaccatcaccatcaccatatgaacacgattaacattgctaagaacgacttctctgacatcgaactggctgctatcccgttcaacactctggctgaccattacggtgagcgtttagctcgcgaacagttggcccttgagcatgagtcttacgagatgggtgaagcacgcttccgcaagatgtttgagcgtcaacttaaagctggtgaggttgcggataacgctgccgccaagcctctcatcactaccctactccctaagatgattgcacgcatcaacgactggtttgaggaagtgaaagctaagcgcggcaagcgcccgacagccttccagttcctgcaagaaatcaagccggaagccgtagcgtacatcaccattaagaccactctggcttgcctaaccagtgcggacaatacaaccgttcaggctgtagcaagcgcaatcggtcgggccattgaggacgaggctcgcttcggtcgtatccgtgaccttgaagctaagcacttcaagaagaacgttgaggaacaactcaacaagcgcgtagggcacgtctacaagaaagcatttatgcaagttgtcgagcacgacatgctctctaagggtctactcggtggcgaggcgtggtcttcgtggcataaggaagactctattcatgtaggagtacgctgcatcgagatgctcattgagtcaaccggaatggttagcttacgtcgccaaaatgctggcgtagtaggtcaagactctgagactatcgaactcgcacctgaatacgctgaggctatcgcaacccgtgcaggtgcgctggctggcatctctccgatgttccaaccttgcgtagttcctcctaagccgtggactggcattactggtggtggctattgggctgcggggcgcaaacccctgcagttagtacgtactcgcagtctggcggcgcttcgccgctatgaagaagtgtcgatgccggaggtcatcaaagcagtcaacattgcgcagaatacagcatggcgtattaacaagaaagttctcgacgtagcgaataccatcacccaatggcagcactgtccagtcgcggatgtgcctgcgatggatcgtggcgaaatgccagctcgtccgttggacatcgataccaacgagattgcacttaaagcgtggaagaaagaagcttccgcgttctaccgcaaagacaaagcacgcgttagccgtcgtctgtcaatggagtttatgttatctcaggcgaacaagtttgcgaattatgaggcaatctggtttccgcaaaacatggattggcgtgggcgcgtgtacgctgtcccgatgttcaatcctcagggcaacgatatgacgaaaggcctgctgacctttgcgcaggagaaacccattggtgaagacggcttctattggctcaagattcatggcgcaaatacagctggagtggataaagtaccgtttccacaacgcatcaaatttgttgaggataaccatacgaatattatggaatgcgcgaaagcaccgctggaaaacacttggtgggcggaacaggactcgccgttctgctttctggcgttctgctttgagtatgctggcgtcatcaatagtggtctgtcgtacaactgtagcttgcctctggcatttgatggtagttgctccggcctgcaacatttctcagcgatgttacgcgacgaaattggcggcaaagctgtgaatctcctcccatctgcggaataccaggatatttatcgtatcgtcagcgacaaagttaacgagatgctgaaacaagatctgattaacggtacctctaccaccgtggaaacggtgactgataagaagacaggcgaaattacccaacgcacgaaatacgggaccaaagttatggcacagtggtggttagaacacggtgtgactcgtggcgtcacgaaacgctcggttatgactttggtgtatgggagcaaagagtttggattccgcgatcaagtgctgagtgacaccattcaaaaagcgatcgataacggcaagggtgacatgtttctgaatccgaatcaggctgctggttacatggcgaaactgatctggaacgcagtgtccgggaccgtagtcgcagcagttgaggcgatgaactggctgaaaagtgcggcgaaattacttgctgctgaagtgaaggatcgtaagacggatacagttctgcgtggccgctgcgcagtacattgggtgactcccgacggcttccctgtgtggcaggaatacaagaagcctattcagacgcgcttgaacctgatgttcctcggtcagttccgcttacagcctaccattaacaccaacaaagatagcgagattgatgcacgcaaacaggtgtctggtatcgctcctaactttgtacacagcctggacggtaaccaccttcgtatgactgtagtgtgggcacacgagaagtacggaatcgaatcttttgcactgattcacgactccttcggtaccattccggctgacgctgcgaacctgttcaaagcagtgcgcgaaactttcgttgacacatatgagtcttgtgatgtactggctgatttctacgaccagattgctgaccagttgcacgagtctcaacgcgacaaaatgccagcacttccggctaaaggtaacttgaacctccgtgacatcttaaaatcggacttcgcgttcgcg

SEQ ID NO: 1778 - protein, 890 aa, synthetic construct
  REGION 1..890: note = Variant of RNA polymerase
MHHHHHHMNTINIAKNDFSDIELAAIPFNTLADHYGERLAREQLALEHESYEMGEARFRKMFERQLKAGEVADNAAAKPLITTLLPKMIARINDWFEEVKAKRGKRPTAFQFLQEIKPEAVAYITIKTTLACLTSADNTTVQAVASAIGRAIEDEARFGRIRDLEAKHFKKNVEEQLNKRVGHVYKKAFMQVVEHDMLSKGLLGGEAWSSWHKEDSIHVGVRCIEMLIESTGMVSLRRQNAGVVGQDSETIELAPEYAEAIATRAGALAGISPMFQPCVVPPKPWTGITGGGYWAAGRKPLQLVRTRSLAALRRYEEVSMPEVIKAVNIAQNTAWRINKKVLDVANTITQWQHCPVADVPAMDRGEMPARPLDIDTNEIALKAWKKEASAFYRKDKARVSRRLSMEFMLSQANKFANYEAIWFPQNMDWRGRVYAVPMFNPQGNDMTKGLLTFAQEKPIGEDGFYWLKIHGANTAGVDKVPFPQRIKFVEDNHTNIMECAKAPLENTWWAEQDSPFCFLAFCFEYAGVINSGLSYNCSLPLAFDGSCSGLQHFSAMLRDEIGGKAVNLLPSAEYQDIYRIVSDKVNEMLKQDLINGTSTTVETVTDKKTGEITQRTKYGTKVMAQWWLEHGVTRGVTKRSVMTLVYGSKEFGFRDQVLSDTIQKAIDNGKGDMFLNPNQAAGYMAKLIWNAVSGTVVAAVEAMNWLKSAAKLLAAEVKDRKTDTVLRGRCAVHWVTPDGFPVWQEYKKPIQTRLNLMFLGQFRLQPTINTNKDSEIDARKQVSGIAPNFVHSLDGNHLRMTVVWAHEKYGIESFALIHDSFGTIPADAANLFKAVRETFVDTYESCDVLADFYDQIADQLHESQRDKMPALPAKGNLNLRDILKSDFAFA

SEQ ID NO: 1779 - DNA, 2670 bp, synthetic construct
  misc_feature 1..2670: note = Variant of RNA polymerase
  source 1..2670: mol_type = other DNA
atgcaccatcaccatcaccatatgaacacgattaacattgctaagaacgacttctctgacatcgaactggctgctatcccgttcaacactctggctgaccattacggtgagcgtttagctcgcgaacagttggcccttgagcatgagtcttacgagatgggtgaagcacgcttccgcaagatgtttgagcgtcaacttaaagctggtgaggttgcggataacgctgccgccaagcctctcatcactaccctactccctaagatgattgcacgcatcaacgactggtttgaggaagtgaaagctaagcgcggcaagcgcccgacagccttccagttcctgcaagaaatcaagccggaagccgtagcgtacatcaccattaagaccactctggcttgcctaaccagcgcggacaatcgcaccgttcaggctgtagcaagcgcaatcggtcgggccattgaggacgaggctcgcttcggtcgtatccgtgaccttgaagctaagcacttcaagaagaacgttgaggaacaactcaacaagcgcgtagggcacgtctacaagaaagcatttatgcaagttgtcgagcacgacatgctctctaagggtctactcggtggcgaggcgtggtcttcgtggcataaggaagactctattcatgtaggagtacgctgcatcgagatgctcattgagtcaaccggaatggttagcttacaccgccaaaatgctggcgtagtaggtcaagactctgagactatcgaactcgcacctgaatacgctgaggctatcgcaacccgtgcaggtgcgctggctggcatctctccgatgttccaaccttgcgtagttcctcctaagccgtggactggcattactggtggtggctattgggctgcggggcgcaaacccctgcagttagtacgtactcgcggtctgaaggcgcttcgccgctatgaagaagtgtcgatgccggaggtcatcaaagcagtcaacattgcgcagaatacagcatggcgtattaacaagaaagttctcgacgtagcgaataccatcacccaatggcagcactgtccagtcgcggatgtgcctgcgatggatcgtggcgaaatgccagctcgtccgttggacatcgataccaacgagattgcacttaaagcgtggaagaaagaagcttccgcgttctaccgcaaagacaaagcacgcgttagccgtcgtctgtcaatggagtttatgttatctcaggcgaacaagtttgcgaattatgaggcaatctggtttccgcaaaacatggattggcgtgggcgcgtgtacgctgtcccgatgttcaatcctcagggcaacgatatgacgaaaggcctgctgacctttgcgcaggagaaacccattggtgaagacggcttctattggctcaagattcatggcgcaaatacagctggagtggataaagtaccgtttccacaacgcatcaaatttgttgaggataaccatacgaatattatggaatgcgcgaaagcaccgctggaaaacacttggtgggcggaacaggactcgccgttctgctttctggcgttctgctttgagtatgctggcgtcatcaatagtggtctgtcgtacaactgtagcttgcctctggcatttgatggtagttgctccggcctgcaacatttctcagcgatgttacgcgacgaaattggcggcaaagctgtgaatctcctcccatctgcggaataccaggatatttatcgtatcgtcagcgacaaagttaacgagatgctgaaacaagatctgattaacggtacctctaccaccgtggaaacggtgactgataagaagacaggcgaaattacccaacgcacgaaatacgggaccaaagttatggcacagtggtggttagaacacggtgtgaatcgtggcgtcacgaaacgctcggttatgactttggtgtatgggagcaaagagtttggattccgcgatcaagtgctgagtgacaccattcaaaaagcgatcgataacggcaagggtgacatgtttctgaatccgaatcaggctgctggttacatggcgaaactgatctggaacgcagtgtccgggaccgtagtcgcagcagttgaggcgatgaactggctgaaaagtgcggcgaaattacttgctgctgaagtgaaggatcgtaagacggatacagttctgcgtggccgctgcgcagtacattgggtgactcccgacggcttccctgtgtggcaggaatacaagaagcctattcagacgcgcttgaacctgatgttcctcggtcagttccgcttacagcctaccattaacaccaacaaagatagcgagattgatgcacgcaaacaggtgtctggtatcgctcctaactttgtacacagcctggacggtaaccaccttcgtatgactgtagtgtgggcacacgagaagtacggaatcgaatcttttgcactgattcacgactccttcggtaccattccggctgacgctgcgaacctgttcaaagcagtgcgcgaaactttcgttgacacatatgagtcttgtgatgtactggctgatttctacgaccagattgctgaccagttgcacgagtctcaacgcgacaaaatgccagcacttccggctaaaggtaacttgaacctccgtgacatcttaaaatcggacttcgcgttcgcg

SEQ ID NO: 1780 - protein, 890 aa, synthetic construct
  REGION 1..890: note = Variant of RNA polymerase
MHHHHHHMNTINIAKNDFSDIELAAIPFNTLADHYGERLAREQLALEHESYEMGEARFRKMFERQLKAGEVADNAAAKPLITTLLPKMIARINDWFEEVKAKRGKRPTAFQFLQEIKPEAVAYITIKTTLACLTSADNRTVQAVASAIGRAIEDEARFGRIRDLEAKHFKKNVEEQLNKRVGHVYKKAFMQVVEHDMLSKGLLGGEAWSSWHKEDSIHVGVRCIEMLIESTGMVSLHRQNAGVVGQDSETIELAPEYAEAIATRAGALAGISPMFQPCVVPPKPWTGITGGGYWAAGRKPLQLVRTRGLKALRRYEEVSMPEVIKAVNIAQNTAWRINKKVLDVANTITQWQHCPVADVPAMDRGEMPARPLDIDTNEIALKAWKKEASAFYRKDKARVSRRLSMEFMLSQANKFANYEAIWFPQNMDWRGRVYAVPMFNPQGNDMTKGLLTFAQEKPIGEDGFYWLKIHGANTAGVDKVPFPQRIKFVEDNHTNIMECAKAPLENTWWAEQDSPFCFLAFCFEYAGVINSGLSYNCSLPLAFDGSCSGLQHFSAMLRDEIGGKAVNLLPSAEYQDIYRIVSDKVNEMLKQDLINGTSTTVETVTDKKTGEITQRTKYGTKVMAQWWLEHGVNRGVTKRSVMTLVYGSKEFGFRDQVLSDTIQKAIDNGKGDMFLNPNQAAGYMAKLIWNAVSGTVVAAVEAMNWLKSAAKLLAAEVKDRKTDTVLRGRCAVHWVTPDGFPVWQEYKKPIQTRLNLMFLGQFRLQPTINTNKDSEIDARKQVSGIAPNFVHSLDGNHLRMTVVWAHEKYGIESFALIHDSFGTIPADAANLFKAVRETFVDTYESCDVLADFYDQIADQLHESQRDKMPALPAKGNLNLRDILKSDFAFA

SEQ ID NO: 1781 - DNA, 2670 bp, synthetic construct
  misc_feature 1..2670: note = Variant of RNA polymerase
  source 1..2670: mol_type = other DNA
atgcaccatcaccatcaccatatgaacacgattaacattgctaagaacgacttctctgacatcgaactggctgctatcccgttcaacactctggctgaccattacggtgagcgtttagctcgcgaacagttggcccttgagcatgagtcttacgagatgggtgaagcacgcttccgcaagatgtttgagcgtcaacttaaagctggtgaggttgcggataacgctgccgccaagcctctcatcactaccctactccctaagatgattgcacgcatcaacgactggtttgaggaagtgaaagctaagcgcggcaagcgcccgacagccttccagttcctgcaagaaatcaagccggaagccgtagcgtacatcaccattaagaccactctggcttgcctaaccagcgcggacaatcgcaccgttcaggctgtagcaagcgctatcggtcgggcaattgaggacgaggctcgcttcggtcgtatccgtgaccttgaagctaagcacttcaagaagaacgttgaggaacaactcaacaagcgcgtagggcacgtctacaagaaagcatttatgcaagttgtcgagcacgacatgctctctaagggtctactcggtggcgaggcgtggtcttcgtggcataaggaagactctattcatgtaggagtacgctgcatcgagatgctcattgagtcaaccggaatggttagcttacaccgccaaaatgctggcgtagtaggtcaagactctgagactatcgaactcgcacctgaatacgctgaggctatcgcaacccgtgcaggtgcgctggctggcatctctccgatgttccaaccttgcgtagttcctcctaagccgtggactggcattactggtggtggctattgggctgcggggcgcaaacccctgcagttagtacgtactcgcggtctggcggcgcttcgccgctatgaagaagtgtcgatgccggaggtcatcaaagcagtcaacattgcgcagaatacagcatggcgtattaacaagaaagttctcgacgtagcgaataccatcacccaatggcagcactgtccagtcgcggatgtgcctgcgatggatcgtggcgaaatgccagctcgtccgttggacatcgataccaacgagattgcacttaaagcgtggaagaaagaagcttccgcgttctaccgcaaagacaaagcacgcgttagccgtcgtctgtcaatggagtttatgttatctcaggcgaacaagtttgcgaattatgaggcaatctggtttccgcaaaacatggattggcgtgggcgcgtgtacgctgtcccgatgttcaatcctcagggcaacgatatgacgaaaggcctgctgacctttgcgcaggagaaacccattggtgaagacggcttctattggctcaagattcatggcgcaaatacagctggagtggataaagtaccgtttccacaacgcatcaaatttgttgaggataaccatacgaatattatggaatgcgcgaaagcaccgctggaaaacacttggtgggcggaacaggactcgccgttctgctttctggcgttctgctttgagtatgctggcgtcatcaatagtggtctgtcgtacaactgtagcttgcctctggcatttgatggtagttgctccggcctgcaacatttctcagcgatgttacgcgacgaaattggcggcaaagctgtgaatctcctcccatctgcggaataccaggatatttatcgtatcgtcagcgacaaagttaacgagatgctgaaacaagatctgattaacggtacctctaccaccgtggaaacggtgactgataagaagacaggcgaaattacccaacgcacgaaatacgggaccaaagttatggcacagtggtggttagaacacggtgtgaatcgtggcgtcacgaaacgctcggttatgactttggtgtatgggagcaaagagtttggattccgcgagcaagtgaaaagtgacaccattcaaaaagcgatcgataacggcaagggtgacatgtttctgaatccgaatcaggctgctggttacatggcgaaactgatctggaacgcagtgtccgggaccgtagtcgcagcagttgaggcgatgaactggctgaaaagtgcggcgaaattacttgctgctgaagtgaaggatcgtaagacggatacaatcctgcgtggccgctgcgcagtacattgggtgactcccgacggcttccctgtgtggcaggaatacaagaagcctattcagacgcgcttgaacctgatgttcctcggtcagttccgcttacagcctaccattaacaccaacaaagatagcgagattgatgcacgcaaacaggtgtctggtatcgctcctaactttgtacacagcctggacggtaaccaccttcgtatgactgtagtgtgggcacacgagaagtacggaatcgaatcttttgcactgattcacgactccttcggtaccattccggctgacgctgcgaacctgttcaaagcagtgcgcgaaactttcgttgacacatatgagtcttgtgatgtactggctgatttctacgaccagattgctgaccagttgcacgagtctcaacgcgacaaaatgccagcacttccggctaaaggtaacttgaacctccgtgacatcttaaaatcggacttcgcgttcgcg

SEQ ID NO: 1782 - protein, 890 aa, synthetic construct
  REGION 1..890: note = Variant of RNA polymerase
MHHHHHHMNTINIAKNDFSDIELAAIPFNTLADHYGERLAREQLALEHESYEMGEARFRKMFERQLKAGEVADNAAAKPLITTLLPKMIARINDWFEEVKAKRGKRPTAFQFLQEIKPEAVAYITIKTTLACLTSADNRTVQAVASAIGRAIEDEARFGRIRDLEAKHFKKNVEEQLNKRVGHVYKKAFMQVVEHDMLSKGLLGGEAWSSWHKEDSIHVGVRCIEMLIESTGMVSLHRQNAGVVGQDSETIELAPEYAEAIATRAGALAGISPMFQPCVVPPKPWTGITGGGYWAAGRKPLQLVRTRGLAALRRYEEVSMPEVIKAVNIAQNTAWRINKKVLDVANTITQWQHCPVADVPAMDRGEMPARPLDIDTNEIALKAWKKEASAFYRKDKARVSRRLSMEFMLSQANKFANYEAIWFPQNMDWRGRVYAVPMFNPQGNDMTKGLLTFAQEKPIGEDGFYWLKIHGANTAGVDKVPFPQRIKFVEDNHTNIMECAKAPLENTWWAEQDSPFCFLAFCFEYAGVINSGLSYNCSLPLAFDGSCSGLQHFSAMLRDEIGGKAVNLLPSAEYQDIYRIVSDKVNEMLKQDLINGTSTTVETVTDKKTGEITQRTKYGTKVMAQWWLEHGVNRGVTKRSVMTLVYGSKEFGFREQVKSDTIQKAIDNGKGDMFLNPNQAAGYMAKLIWNAVSGTVVAAVEAMNWLKSAAKLLAAEVKDRKTDTILRGRCAVHWVTPDGFPVWQEYKKPIQTRLNLMFLGQFRLQPTINTNKDSEIDARKQVSGIAPNFVHSLDGNHLRMTVVWAHEKYGIESFALIHDSFGTIPADAANLFKAVRETFVDTYESCDVLADFYDQIADQLHESQRDKMPALPAKGNLNLRDILKSDFAFA

SEQ ID NO: 1783 - DNA, 2670 bp, synthetic construct
  misc_feature 1..2670: note = Variant of RNA polymerase
  source 1..2670: mol_type = other DNA
atgcaccatcaccatcaccatatgaacacgattaacattgctaagaacgacttctctgacatcgaactggctgctatcccgttcaacactctggctgaccattacggtgagcgtttagctcgcgaacagttggcccttgagcatgagtcttacgagatgggtgaagcacgcttccgcaagatgtttgagcgtcaacttaaagctggtgaggttgcggataacgctgccgccaagcctctcatcactaccctactccctaagatgattgcacgcatcaacgactggtttgaggaagtgaaagctaagcgcggcaagcgcccgacagccttccagttcctgcaagaaatcaagccggaagccgtagcgtacatcaccattaagacgactctggcttgcctaaccagtgcggacaatacaaccgttcaggctgtttcgagcgcaatcggtcgggccattgaggacgaggctcgcttcggtcgtatccgtgaccttgaagctaagcacttcaagaagaacgttgaggaacaactcaacaagcgcgtagggcacgtctacaagaaagcatttatgcaagttgtcgagcacgacatgctctctaagggtctactcggtggcgaggcgtggtcttcgtggcataaggaagactctattcatgtaggagtacgctgcatcgagatgctcattgagtcaaccggaatggttagcttacaccgccaaaatgctggcgtagtaggtcaagactctgagcgtatcgaactcgcacctgaatacgctgaggctatcgcaacccgtgcaggtgcgctggctggcatctctccgatgttccaaccttgcgtagttcctcctaagccgtggactggcattactggtggtggctattgggctgcggggcgcaaacccctgcagttagtacgtactcgcggtctgaaggcgcttcgccgctatgaagaagtgtcgatgccggaggtcatcaaagcagtcaacattgcgcagaatacagcatggcgtattaacaagaaagttctcgacgtagcgaataccatcacccaatggcagcactgtccagtcgcggatgtgcctgcgatggatcgtggcgaaatgccagctcgtccgttggacatcgataccaacgagattgcacttaaagcgtggaagaaagaagcttccgcgttctaccgcaaagacaaagcacgcgttagccgtcgtctgtcaatggagtttatgttatctcaggcgaacaagtttgcgaattatgaggcaatctggtttccgcaaaacatggattggcgtgggcgcgtgtacgctgtcccgatgttcaatcctcagggcaacgatatgacgaaaggcctgctgacctttgcgcaggagaaacccattggtgaagacggcttctattggctcaagattcatggcgcaaatacagctggagtggataaagtaccgtttccacaacgcatcaaatttgttgaggataaccatacgaatattatggaatgcgcgaaagcaccgctggaaaacacttggtgggcggaacaggactcgccgttctgctttctggcgttctgctttgagtatgctggcgtcatcaatagtggtctgtcgtacaactgtagcttgcctctggcatttgatggtagttgctccggcctgcaacatttctcagcgatgttacgcgacgaaattggcggcaaagctgtgaatctcctcccatctgcggaataccaggatatttatcgtatcgtcagcgacaaagttaacgagatgctgaaacaagatctgattaacggtacctctaccaccgtggaaacggtgactgataagaagacaggcgaaattacccaacgcacgaaatacgggaccaaagttatggcacagtggtggttagaacacggtgtgaatcgtggcgtcacgaaacgctcggttatgactttggtgtatgggagcaaagagtttggattccgcgatcaagtgctgagtgacaccattcaaaaagcgatcgataacggcaagggtgacatgtttctgaatccgaatcaggctgctggttacatggcgaaactgatctggaacgcagtgtccgggaccgtagtcgcagcagttgaggcgatgaactggctgaaaagtgcggcgaaattacttgctgctgaagtgaaggatcgtaagacggatacagttctgcgtggccgctgcgcagtacattgggtgactcccgacggcttccctgtgtggcaggaatacaagaagcctattcagacgcgcttgaacctgatgttcctcggtcagttccgcttacagcctaccattaacaccaacaaagatagcgagattgatgcacgcaaacaggtgtctggtatcgctcctaactttgtacacagcctggacggtaaccaccttcgtatgactgtagtgtgggcacacgagaagtacggaatcgaatcttttgcactgattcacgactccttcggtaccattccggctgacgctgcgaacctgttcaaagcagtgcgcgaaactttcgttgacacatatgagtcttgtgatgtactggctgatttctacgaccagattgctgaccagttgcacgagtctcaacgcgacaaaatgccagcacttccggctaaaggtaacttgaacctccgtgacatcttaaaatcggacttcgcgttcgcg

SEQ ID NO: 1784 - protein, 890 aa, synthetic construct
  REGION 1..890: note = Variant of RNA polymerase
MHHHHHHMNTINIAKNDFSDIELAAIPFNTLADHYGERLAREQLALEHESYEMGEARFRKMFERQLKAGEVADNAAAKPLITTLLPKMIARINDWFEEVKAKRGKRPTAFQFLQEIKPEAVAYITIKTTLACLTSADNTTVQAVSSAIGRAIEDEARFGRIRDLEAKHFKKNVEEQLNKRVGHVYKKAFMQVVEHDMLSKGLLGGEAWSSWHKEDSIHVGVRCIEMLIESTGMVSLHRQNAGVVGQDSERIELAPEYAEAIATRAGALAGISPMFQPCVVPPKPWTGITGGGYWAAGRKPLQLVRTRGLKALRRYEEVSMPEVIKAVNIAQNTAWRINKKVLDVANTITQWQHCPVADVPAMDRGEMPARPLDIDTNEIALKAWKKEASAFYRKDKARVSRRLSMEFMLSQANKFANYEAIWFPQNMDWRGRVYAVPMFNPQGNDMTKGLLTFAQEKPIGEDGFYWLKIHGANTAGVDKVPFPQRIKFVEDNHTNIMECAKAPLENTWWAEQDSPFCFLAFCFEYAGVINSGLSYNCSLPLAFDGSCSGLQHFSAMLRDEIGGKAVNLLPSAEYQDIYRIVSDKVNEMLKQDLINGTSTTVETVTDKKTGEITQRTKYGTKVMAQWWLEHGVNRGVTKRSVMTLVYGSKEFGFRDQVLSDTIQKAIDNGKGDMFLNPNQAAGYMAKLIWNAVSGTVVAAVEAMNWLKSAAKLLAAEVKDRKTDTVLRGRCAVHWVTPDGFPVWQEYKKPIQTRLNLMFLGQFRLQPTINTNKDSEIDARKQVSGIAPNFVHSLDGNHLRMTVVWAHEKYGIESFALIHDSFGTIPADAANLFKAVRETFVDTYESCDVLADFYDQIADQLHESQRDKMPALPAKGNLNLRDILKSDFAFA

SEQ ID NO: 1785 - DNA, 2670 bp, synthetic construct
  misc_feature 1..2670: note = Variant of RNA polymerase
  source 1..2670: mol_type = other DNA
atgcaccatcaccatcaccatatgaacacgattaacattgctaagaacgacttctctgacatcgaactggctgctatcccgttcaacactctggctgaccattacggtgagcgtttagctcgcgaacagttggcccttgagcatgagtcttacgagatgggtgaagcacgcttccgcaagatgtttgagcgtcaacttaaagctggtgaggttgcggataacgctgccgccaagcctctcatcactaccctactccctaagatgattgcacgcatcaacgactggtttgaggaagtgaaagctaagcgcggcaagcgcccgacagccttccagttcctgcaagaaatcaagccggaagccgtagcgtacatcaccattaagaccactctggcttgcctaaccagcgcggacaatcgcaccgttcaggctgtagcaagcgcaatcggtcgggcaattgaggacgaggctcgcttcggtcgtatccgtgaccttgaagctaagcacttcaagaagaacgttgaggaacaactcaacaagcgcgtagggcacgtctacaagaaagcatttatgcaagttgtcgagcacgacatgctctctaagggtctactcggtggcgaggcgtggtcttcgtggcataaggaagactctattcatgtaggagtacgctgcatcgagatgctcattgagtcaaccggaatggttagcttacaccgccaaaatgctggcgtagtaggtcaagactctgagactatcgaactcgcacctgaatacgctgaggctatcgcaacccgtgcaggtgcgctggctggcatctctccgatgttccaaccttgcgtagttcctcctaagccgtggactggcattactggtggtggctattgggctgcggggcgcaaacccctgcagttagtacgtactcgcagtctggcggcgcttcgccgctatgaagaagtgtcgatgccggaggtcatcaaagcagtcaacattgcgcagaatacagcatggcgtattaacaagaaagttctcgacgtagcgaataccatcacccaatggcagcactgtccagtccgtgatgtccctgcgatggatcgtggcgaaatgccagctcgtccgttggacatcgataccaacgagattgcacttaaagcgtggaagaaagaagcttccgcgttctaccgcaaagacaaagcacgcgttagccgtcgtctgtcaatggagtttatgttatctcaggcgaacaagtttgcgaattatgaggcaatctggtttccgcaaaacatggattggcgtgggcgcgtgtacgctgtcccgatgttcaatcctcagggcaacgatatgacgaaaggcctgctgacctttgcgcaggagaaacccattggtgaagacggcttctattggctcaagattcatggcgcaaatacagctggagtggataaagtaccgtttccacaacgcatcaaatttgttgaggataaccatacgaatattatggaatgcgcgaaagcaccgctggaaaacacttggtgggcggaacaggactcgccgttctgctttctggcgttctgctttgagtatgctggcgtcatcaatagtggtctgtcgtacaactgtagcttgcctctggcatttgatggtagttgctccggcctgcaacatttctcagcgatgttacgcgacgaaattggcggcaaagctgtgaatctcctcccatctgcggaataccaggatatttatcgtatcgtcagcgacaaagttaacgagatgctgaaacaagatctgattaacggtacctctaccaccgtggaaacggtgactgataagaagacaggcgaaattacccaacgcacgaaatacgggaccaaagttatggcacagtggtggttagaacacggtgtgaatcgtggcgtcacgaaacgctcggttatgactttggtgtatgggagcaaagagtttggattccgcgagcaagtgcgtagtgacaccattcaaaaagcgatcgataacggcaagggtgacatgtttctgaatccgaatcaggctgctggttacatggcgaaactgatctggaacgcagtgtccgggaccgtagtcgcagcagttgaggcgatgaactggctgaaaagtgcggcgaaattacttgctgctgaagtgaaggatcgtaagacggatacagttctgcgtggccgctgcgcagtacattgggtgactcccgacggcttccctgtgtggcaggaatacaagaagcctattcagacgcgcttgaacctgatgttcctcggtcagttccgcttacagcctaccattaacaccaacaaagatagcgagattgatgcacgcaaacaggtgtctggtatcgctcctaactttgtacacagcctggacggtaaccaccttcgtatgactgtagtgtgggcacacgagaagtacggaatcgaatcttttgcactgattcacgactccttcggtaccattccggctgacgctgcgaacctgttcaaagcagtgcgcgaaactttcgttgacacatatgagtcttgtgatgtactggctgatttctacgaccagattgctgaccagttgcacgagtctcaacgcgacaaaatgccagcacttccggctaaaggtaacttgaacctccgtgacatcttaaaatcggacttcgcgttcgcg

SEQ ID NO: 1786 - protein, 890 aa, synthetic construct
  REGION 1..890: note = Variant of RNA polymerase
MHHHHHHMNTINIAKNDFSDIELAAIPFNTLADHYGERLAREQLALEHESYEMGEARFRKMFERQLKAGEVADNAAAKPLITTLLPKMIARINDWFEEVKAKRGKRPTAFQFLQEIKPEAVAYITIKTTLACLTSADNRTVQAVASAIGRAIEDEARFGRIRDLEAKHFKKNVEEQLNKRVGHVYKKAFMQVVEHDMLSKGLLGGEAWSSWHKEDSIHVGVRCIEMLIESTGMVSLHRQNAGVVGQDSETIELAPEYAEAIATRAGALAGISPMFQPCVVPPKPWTGITGGGYWAAGRKPLQLVRTRSLAALRRYEEVSMPEVIKAVNIAQNTAWRINKKVLDVANTITQWQHCPVRDVPAMDRGEMPARPLDIDTNEIALKAWKKEASAFYRKDKARVSRRLSMEFMLSQANKFANYEAIWFPQNMDWRGRVYAVPMFNPQGNDMTKGLLTFAQEKPIGEDGFYWLKIHGANTAGVDKVPFPQRIKFVEDNHTNIMECAKAPLENTWWAEQDSPFCFLAFCFEYAGVINSGLSYNCSLPLAFDGSCSGLQHFSAMLRDEIGGKAVNLLPSAEYQDIYRIVSDKVNEMLKQDLINGTSTTVETVTDKKTGEITQRTKYGTKVMAQWWLEHGVNRGVTKRSVMTLVYGSKEFGFREQVRSDTIQKAIDNGKGDMFLNPNQAAGYMAKLIWNAVSGTVVAAVEAMNWLKSAAKLLAAEVKDRKTDTVLRGRCAVHWVTPDGFPVWQEYKKPIQTRLNLMFLGQFRLQPTINTNKDSEIDARKQVSGIAPNFVHSLDGNHLRMTVVWAHEKYGIESFALIHDSFGTIPADAANLFKAVRETFVDTYESCDVLADFYDQIADQLHESQRDKMPALPAKGNLNLRDILKSDFAFA

SEQ ID NO: 1787 - DNA, 2670 bp, synthetic construct
  misc_feature 1..2670: note = Variant of RNA polymerase
  source 1..2670: mol_type = other DNA
atgcaccatcaccatcaccatatgaacacgattaacattgctaagaacgacttctctgacatcgaactggctgctatcccgttcaacactctggctgaccattacggtgagcgtttagctcgcgaacagttggcccttgagcatgagtcttacgagatgggtgaagcacgcttccgcaagatgtttgagcgtcaacttaaagctggtgaggttgcggataacgctgccgccaagcctctcatcactaccctactccctaagatgattgcacgcatcaacgactggtttgaggaagtgaaagctaagcgcggcaagcgcccgacagccttccagttcctgcaagaaatcaagccggaagccgtagcgtacatcaccattaagaccactctggcttgcctaaccagtgcggacaatacaaccgttcaggctgtagcaagcgcaatcggtcgggccattgaggacgaggctcgcttcggtcgtatccgtgaccttgaagctaagcacttcaagaagaacgttgaggaacaactcaacaagcgcgtagggcacgtctacaagaaagcatttatgcaagttgtcgagcacgacatgctctctaagggtctactcggtggcgaggcgtggtcttcgtggcataaggaagactctattcatgtaggagtacgctgcatcgagatgctcattgagtcaaccggaatggttagcttacaccgccaaaatgctggcgtagtaggtcaagactctgagactatcgaactcgcacctgaatacgctgaggctatcgcaacccgtgcaggtgcgctggctggcatctctccgatgttccaaccttgcgtagttcctcctaagccgtggactggcattactggtggtggctattgggctgcggggcgcaaacccctgcagttagtacgtactcgcagtctggcggcgcttcgccgctatgaagaagtgtcgatgccggaggtcatcaaagcagtcaacattgcgcagaatacagcatggcgtattaacaagaaagttctcgacgtagcgaataccatcacccaatggcagcactgtccagtcgcggatgtgcctgcgatggatcgtggcgaaatgccagctcgtccgttggacatcgataccaacgagattgcacttaaagcgtggaagaaagaagcttccgcgttctaccgcaaagacaaagcacgcgttagccgtcgtctgtcaatggagtttatgttatctcaggcgaacaagtttgcgaattatgaggcaatctggtttccgcaaaacatggattggcgtgggcgcgtgtacgctgtcccgatgttcaatcctcagggcaacgatatgacgaaaggcctgctgacctttgcgcaggagaaacccattggtgaagacggcttctattggctcaagattcatggcgcaaatacagctggagtggataaagtaccgtttccacaacgcatcaaatttgttgaggataaccatacgaatattatggaatgcgcgaaagcaccgctggaaaacacttggtgggcggaacaggactcgccgttctgctttctggcgttctgctttgagtatgctggcgtcatcaatagtggtctgtcgtacaactgtagcttgcctctggcatttgatggtagttgctccggcctgcaacatttctcagcgatgttacgcgacgaaattggcggcaaagctgtgaatctcctcccatctgcggaataccaggatatttatcgtatcgtcagcgacaaagttaacgagatgctgaaacaagatctgattaacggtacctctaccaccgtggaaacggtgactgataagaagacaggcgaaattacccaacgcacgaaatacgggaccaaagttatggcacagtggtggttagaacacggtgtgactcgtggcgtcacgaaacgctcggttatgactttggtgtatgggagcaaagagtttggattccgcgagcaagtgaaaagtgacaccattcaaaaagcgatcgataacggcaagggtgacatgtttctgaatccgaatcaggctgctggttacatggcgaaactgatctggaacgcagtgtccgggaccgtagtcgcagcagttgaggcgatgaactggctgaaaagtgcggcgaaattacttgctgctgaagtgaaggatcgtaagacggatacaatcctgcgtggccgctgcgcagtacattgggtgactcccgacggcttccctgtgtggcaggaatacaagaagcctattcagacgcgcttgaacctgatgttcctcggtcagttccgcttacagcctaccattaacaccaacaaagatagcgagattgatgcacgcaaacaggtgtctggtatcgctcctaactttgtacacagcctggacggtaaccaccttcgtatgactgtagtgtgggcacacgagaagtacggaatcgaatcttttgcactgattcacgactccttcggtaccattccggctgacgctgcgaacctgttcaaagcagtgcgcgaaactttcgttgacacatatgagtcttgtgatgtactggctgatttctacgaccagattgctgaccagttgcacgagtctcaacgcgacaaaatgccagcacttccggctaaaggtaacttgaacctccgtgacatcttaaaatcggacttcgcgttcgcg

SEQ ID NO: 1788 - protein, 890 aa, synthetic construct
  REGION 1..890: note = Variant of RNA polymerase
MHHHHHHMNTINIAKNDFSDIELAAIPFNTLADHYGERLAREQLALEHESYEMGEARFRKMFERQLKAGEVADNAAAKPLITTLLPKMIARINDWFEEVKAKRGKRPTAFQFLQEIKPEAVAYITIKTTLACLTSADNTTVQAVASAIGRAIEDEARFGRIRDLEAKHFKKNVEEQLNKRVGHVYKKAFMQVVEHDMLSKGLLGGEAWSSWHKEDSIHVGVRCIEMLIESTGMVSLHRQNAGVVGQDSETIELAPEYAEAIATRAGALAGISPMFQPCVVPPKPWTGITGGGYWAAGRKPLQLVRTRSLAALRRYEEVSMPEVIKAVNIAQNTAWRINKKVLDVANTITQWQHCPVADVPAMDRGEMPARPLDIDTNEIALKAWKKEASAFYRKDKARVSRRLSMEFMLSQANKFANYEAIWFPQNMDWRGRVYAVPMFNPQGNDMTKGLLTFAQEKPIGEDGFYWLKIHGANTAGVDKVPFPQRIKFVEDNHTNIMECAKAPLENTWWAEQDSPFCFLAFCFEYAGVINSGLSYNCSLPLAFDGSCSGLQHFSAMLRDEIGGKAVNLLPSAEYQDIYRIVSDKVNEMLKQDLINGTSTTVETVTDKKTGEITQRTKYGTKVMAQWWLEHGVTRGVTKRSVMTLVYGSKEFGFREQVKSDTIQKAIDNGKGDMFLNPNQAAGYMAKLIWNAVSGTVVAAVEAMNWLKSAAKLLAAEVKDRKTDTILRGRCAVHWVTPDGFPVWQEYKKPIQTRLNLMFLGQFRLQPTINTNKDSEIDARKQVSGIAPNFVHSLDGNHLRMTVVWAHEKYGIESFALIHDSFGTIPADAANLFKAVRETFVDTYESCDVLADFYDQIADQLHESQRDKMPALPAKGNLNLRDILKSDFAFA

SEQ ID NO: 1789 - DNA, 2670 bp, synthetic construct
  misc_feature 1..2670: note = Variant of RNA polymerase
  source 1..2670: mol_type = other DNA
atgcaccatcaccatcaccatatgaacacgattaacattgctaagaacgacttctctgacatcgaactggctgctatcccgttcaacactctggctgaccattacggtgagcgtttagctcgcgaacagttggcccttgagcatgagtcttacgagatgggtgaagcacgcttccgcaagatgtttgagcgtcaacttaaagctggtgaggttgcggataacgctgccgccaagcctctcatcactaccctactccctaagatgattgcacgcatcaacgactggtttgaggaagtgaaagctaagcgcggcaagcgcccgacagccttccagttcctgcaagaaatcaagccggaagccgtagcgtacatcaccattaagaccactctggcttgcctaaccagtgcggacaatacaaccgttcaggctgttgcgagcgcaatcggtcgggccattgaggacgaggctcgcttcggtcgtatccgtgaccttgaagctaagcacttcaagaagaacgttgaggaacaactcaacaagcgcgtagggcacgtctacaagaaagcatttatgcaagttgtcgagcacgacatgctctctaagggtctactcggtggcgaggcgtggtcttcgtggcataaggaagactctattcatgtaggagtacgctgcatcgagatgctcattgagtcaaccggaatggttagcttacaccgccaaaatgctggcgtagtaggtcaagactctgagcgtatcgaactcgcacctgaatacgctgaggctatcgcaacccgtgcaggtgcgctggctggcatctctccgatgttccaaccttgcgtagttcctcctaagccgtggactggcattactggtggtggctattgggctgcggggcgcaaacccctgcagttagtacgtactcgcagtctgcacgcgcttcgccgctatgaagaagtgtcgatgccggaggtcatcaaagcagtcaacattgcgcagaatacagcatggcgtattaacaagaaagttctcgacgtagcgaataccatcacccaatggcagcactgtccagtcgcggatgtgcctgcgatggatcgtggcgaaatgccagctcgtccgttggacatcgataccaacgagattgcacttaaagcgtggaagaaagaagcttccgcgttctaccgcaaagacaaagcacgcgttagccgtcgtctgtcaatggagtttatgttatctcaggcgaacaagtttgcgaattatgaggcaatctggtttccgcaaaacatggattggcgtgggcgcgtgtacgctgtcccgatgttcaatcctcagggcaacgatatgacgaaaggcctgctgacctttgcgcaggagaaacccattggtgaagacggcttctattggctcaagattcatggcgcaaatacagctggagtggataaagtaccgtttccacaacgcatcaaatttgttgaggataaccatacgaatattatggaatgcgcgaaagcaccgctggaaaacacttggtgggcggaacaggactcgccgttctgctttctggcgttctgctttgagtatgctggcgtcatcaatagtggtctgtcgtacaactgtagcttgcctctggcatttgatggtagttgctccggcctgcaacatttctcagcgatgttacgcgacgaaattggcggcaaagctgtgaatctcctcccatctgcggaataccaggatatttatcgtatcgtcagcgacaaagttaacgagatgctgaaacaagatctgattaacggtacctctaccaccgtggaaacggtgactgataagaagacaggcgaaattacccaacgcacgaaatacgggaccaaagttatggcacagtggtggttagaacacggtgtgaatcgtggcgtcacgaaacgctcggttatgactttggtgtatgggagcaaagagtttggattccgcgatcaagtgctgagtgacaccattcaaaaagcgatcgataacggcaagggtgacatgtttctgaatccgaatcaggctgctggttacatggcgaaactgatctggaacgcagtgtccgggaccgtagtcgcagcagttgaggcgatgaactggctgaaaagtgcggcgaaattacttgctgctgaagtgaaggatcgtaagacggatacagttctgcgtggccgctgcgcagtacattgggtgactcccgacggcttccctgtgtggcaggaatacaagaagcctattcagacgcgcttgaacctgatgttcctcggtcagttccgcttacagcctaccattaacaccaacaaagatagcgagattgatgcacgcaaacaggtgtctggtatcgctcctaactttgtacacagcctggacggtaaccaccttcgtatgactgtagtgtgggcacacgagaagtacggaatcgaatcttttgcactgattcacgactccttcggtaccattccggctgacgctgcgaacctgttcaaagcagtgcgcgaaactttcgttgacacatatgagtcttgtgatgtactggctgatttctacgaccagattgctgaccagttgcacgagtctcaacgcgacaaaatgccagcacttccggctaaaggtaacttgaacctccgtgacatcttaaaatcggacttcgcgttcgcg

SEQ ID NO: 1790 - protein, 890 aa, synthetic construct
  REGION 1..890: note = Variant of RNA polymerase
MHHHHHHMNTINIAKNDFSDIELAAIPFNTLADHYGERLAREQLALEHESYEMGEARFRKMFERQLKAGEVADNAAAKPLITTLLPKMIARINDWFEEVKAKRGKRPTAFQFLQEIKPEAVAYITIKTTLACLTSADNTTVQAVASAIGRAIEDEARFGRIRDLEAKHFKKNVEEQLNKRVGHVYKKAFMQVVEHDMLSKGLLGGEAWSSWHKEDSIHVGVRCIEMLIESTGMVSLHRQNAGVVGQDSERIELAPEYAEAIATRAGALAGISPMFQPCVVPPKPWTGITGGGYWAAGRKPLQLVRTRSLHALRRYEEVSMPEVIKAVNIAQNTAWRINKKVLDVANTITQWQHCPVADVPAMDRGEMPARPLDIDTNEIALKAWKKEASAFYRKDKARVSRRLSMEFMLSQANKFANYEAIWFPQNMDWRGRVYAVPMFNPQGNDMTKGLLTFAQEKPIGEDGFYWLKIHGANTAGVDKVPFPQRIKFVEDNHTNIMECAKAPLENTWWAEQDSPFCFLAFCFEYAGVINSGLSYNCSLPLAFDGSCSGLQHFSAMLRDEIGGKAVNLLPSAEYQDIYRIVSDKVNEMLKQDLINGTSTTVETVTDKKTGEITQRTKYGTKVMAQWWLEHGVNRGVTKRSVMTLVYGSKEFGFRDQVLSDTIQKAIDNGKGDMFLNPNQAAGYMAKLIWNAVSGTVVAAVEAMNWLKSAAKLLAAEVKDRKTDTVLRGRCAVHWVTPDGFPVWQEYKKPIQTRLNLMFLGQFRLQPTINTNKDSEIDARKQVSGIAPNFVHSLDGNHLRMTVVWAHEKYGIESFALIHDSFGTIPADAANLFKAVRETFVDTYESCDVLADFYDQIADQLHESQRDKMPALPAKGNLNLRDILKSDFAFA

SEQ ID NO: 1791 - DNA, 2670 bp, synthetic construct
  misc_feature 1..2670: note = Variant of RNA polymerase
  source 1..2670: mol_type = other DNA
atgcaccatcaccatcaccatatgaacacgattaacattgctaagaacgacttctctgacatcgaactggctgctatcccgttcaacactctggctgaccattacggtgagcgtttagctcgcgaacagttggcccttgagcatgagtcttacgagatgggtgaagcacgcttccgcaagatgtttgagcgtcaacttaaagctggtgaggttgcggataacgctgccgccaagcctctcatcactaccctactccctaagatgattgcacgcatcaacgactggtttgaggaagtgaaagctaagcgcggcaagcgcccgacagccttccagttcctgcaagaaatcaagccggaagccgtagcgtacatcaccattaagacgactctggcttgcctaaccagtgcggacaatacaaccgttcaggctgtagcaagcgcaatcggtcgggccattgaggacgaggctcgcttcggtcgtatccgtgaccttgaagctaagcacttcaagaagaacgttgaggaacaactcaacaagcgcgtagggcacgtctacaagaaagcatttatgcaagttgtcgagcacgacatgctctctaagggtctactcggtggcgaggcgtggtcttcgtggcataaggaagactctattcatgtaggagtacgctgcatcgagatgctcattgagtcaaccggaatggttagcttacgtcgccaaaatgctggcgtagtaggtcaagactctgagcgtatcgaactcgcacctgaatacgctgaggctatcgcaacccgtgcaggtgcgctggctggcatctctccgatgttccaaccttgcgtagttcctcctaagccgtggactggcattactggtggtggctattgggctgcggggcgcaaacccctgcagttagtacgtactcgcagtctggcggcgcttcgccgctatgaagaagtgtcgatgccggaggtcatcaaagcagtcaacattgcgcagaatacagcatggcgtattaacaagaaagttctcgacgtagcgaataccatcacccaatggcagcactgtccagtcgcggatgtgcctgcgatggatcgtggcgaaatgccagctcgtccgttggacatcgataccaacgagattgcacttaaagcgtggaagaaagaagcttccgcgttctaccgcaaagacaaagcacgcgttagccgtcgtctgtcaatggagtttatgttatctcaggcgaacaagtttgcgaattatgaggcaatctggtttccgcaaaacatggattggcgtgggcgcgtgtacgctgtcccgatgttcaatcctcagggcaacgatatgacgaaaggcctgctgacctttgcgcaggagaaacccattggtgaagacggcttctattggctcaagattcatggcgcaaatacagctggagtggataaagtaccgtttccacaacgcatcaaatttgttgaggataaccatacgaatattatggaatgcgcgaaagcaccgctggaaaacacttggtgggcggaacaggactcgccgttctgctttctggcgttctgctttgagtatgctggcgtcatcaatagtggtctgtcgtacaactgtagcttgcctctggcatttgatggtagttgctccggcctgcaacatttctcagcgatgttacgcgacgaaattggcggcaaagctgtgaatctcctcccatctgcggaataccaggatatttatcgtatcgtcagcgacaaagttaacgagatgctgaaacaagatctgattaacggtacctctaccaccgtggaaacggtgactgataagaagacaggcgaaattacccaacgcacgaaatacgggaccaaagttatggcacagtggtggttagaacacggtgtgaatcgtggcgtcacgaaacgctcggttatgactttggtgtatgggtcgaagccgtttggattccgcgatcaagtgctgagtgacaccattcaaaaagcgatcgataacggcaagggtgacatgtttctgaatccgaatcaggctgctggttacatggcgaaactgatctggaacgcagtgtccgggaccgtagtcgcagcagttgaggcgatgaactggctgaaaagtgcggcgaaattacttgctgctgaagtgaaggatcgtaagacggatacagttctgcgtggccgctgcgcagtacattgggtgactcccgacggcttccctgtgtggcaggaatacaagaagcctattcagacgcgcttgaacctgatgttcctcggtcagttccgcttacagcctaccattaacaccaacaaagatagcgagattgatgcacgcaaacaggtgtctggtatcgctcctaactttgtacacagcctggacggtaaccaccttcgtatgactgtagtgtgggcacacgagaagtacggaatcgaatcttttgcactgattcacgactccttcggtaccattccggctgacgctgcgaacctgttcaaagcagtgcgcgaaactttcgttgacacatatgagtcttgtgatgtactggctgatttctacgaccagattgctgaccagttgcacgagtctcaacgcgacaaaatgccagcacttccggctaaaggtaacttgaacctccgtgacatcttaaaatcggacttcgcgttcgcg

SEQ ID NO: 1792 - protein, 890 aa, synthetic construct
  REGION 1..890: note = Variant of RNA polymerase
MHHHHHHMNTINIAKNDFSDIELAAIPFNTLADHYGERLAREQLALEHESYEMGEARFRKMFERQLKAGEVADNAAAKPLITTLLPKMIARINDWFEEVKAKRGKRPTAFQFLQEIKPEAVAYITIKTTLACLTSADNTTVQAVASAIGRAIEDEARFGRIRDLEAKHFKKNVEEQLNKRVGHVYKKAFMQVVEHDMLSKGLLGGEAWSSWHKEDSIHVGVRCIEMLIESTGMVSLRRQNAGVVGQDSERIELAPEYAEAIATRAGALAGISPMFQPCVVPPKPWTGITGGGYWAAGRKPLQLVRTRSLAALRRYEEVSMPEVIKAVNIAQNTAWRINKKVLDVANTITQWQHCPVADVPAMDRGEMPARPLDIDTNEIALKAWKKEASAFYRKDKARVSRRLSMEFMLSQANKFANYEAIWFPQNMDWRGRVYAVPMFNPQGNDMTKGLLTFAQEKPIGEDGFYWLKIHGANTAGVDKVPFPQRIKFVEDNHTNIMECAKAPLENTWWAEQDSPFCFLAFCFEYAGVINSGLSYNCSLPLAFDGSCSGLQHFSAMLRDEIGGKAVNLLPSAEYQDIYRIVSDKVNEMLKQDLINGTSTTVETVTDKKTGEITQRTKYGTKVMAQWWLEHGVNRGVTKRSVMTLVYGSKPFGFRDQVLSDTIQKAIDNGKGDMFLNPNQAAGYMAKLIWNAVSGTVVAAVEAMNWLKSAAKLLAAEVKDRKTDTVLRGRCAVHWVTPDGFPVWQEYKKPIQTRLNLMFLGQFRLQPTINTNKDSEIDARKQVSGIAPNFVHSLDGNHLRMTVVWAHEKYGIESFALIHDSFGTIPADAANLFKAVRETFVDTYESCDVLADFYDQIADQLHESQRDKMPALPAKGNLNLRDILKSDFAFA

SEQ ID NO: 1793 - DNA, 2670 bp, synthetic construct
  misc_feature 1..2670: note = Variant of RNA polymerase
  source 1..2670: mol_type = other DNA
atgcaccatcaccatcaccatatgaacacgattaacattgctaagaacgacttctctgacatcgaactggctgctatcccgttcaacactctggctgaccattacggtgagcgtttagctcgcgaacagttggcccttgagcatgagtcttacgagatgggtgaagcacgcttccgcaagatgtttgagcgtcaacttaaagctggtgaggttgcggataacgctgccgccaagcctctcatcactaccctactccctaagatgattgcacgcatcaacgactggtttgaggaagtgaaagctaagcgcggcaagcgcccgacagccttccagttcctgcaagaaatcaagccggaagccgtagcgtacatcaccattaagaccactctggcttgcctaaccagtgcggacaatcgcaccgttcaggctgtagcaagcgctatcggtcggcgtattgaggacgaggctcgcttcggtcgtatccgtgaccttgaagctaagcacttcaagaagaacgttgaggaacaactcaacaagcgcgtagggcacgtctacaagaaagcatttatgcaagttgtcgagcacgacatgctctctaagggtctactcggtggcgaggcgtggtcttcgtggcataaggaagactctattcatgtaggagtacgctgcatcgagatgctcattgagtcaaccggaatggttagcttacaccgccaaaatgctggcgtagtaggtcaagactctgagactatcgaactcgcacctgaatacgctgaggctatcgcaacccgtgcaggtgcgctggctggcatctctccgatgttccaaccttgcgtagttcctcctaagccgtggactggcattactggtggtggctattgggctgcggggcgcaaacccctgcagttagtacgtactcgcggtctggaggcgcttcgccgctatgaagaagtgtcgatgccggaggtcatcaaagcagtcaacattgcgcagaatacagcatggcgtattaacaagaaagttctcgacgtagcgaataccatcacccaatggaaacactgtccagtcgctgatatccctgcgatggatcgtggcgaaatgccagctcgtccgttggacatcgataccaacgagattgcacttaaagcgtggaagaaagaggcttccgcgttctaccgcaaagacaaagcacgcgttagccgtcgtctgtcaatggagtttatgttatctcaggcgaacaagtttgcgaattatgaggcaatctggtttccgcaaaacatggattggcgtgggcgcgtgtacgctgtcccgatgttcaatcctcagggcaacgatatgacgaaaggcctgctgacctttgcgcaggagaaacccattggtgaagacggcttctattggctcaagattcatggcgcaaatacagctggagtggataaagtaccgtttccacaacgcatcaaatttgttgaggataaccatacgaatattatggaatgcgcgaaagcaccgctggaaaacacttggtgggcggaacaggactcgccgttctgctttctggcgttctgctttgagtatgctggcgtcatcaatagtggtctgtcgtacaactgtagcttgcctctggcatttgatggtagttgctccggcctgcaacatttctcagcgatgttacgcgacgaaattggcggcaaagctgtgaatctcctcccatctgcggaataccaggatatttatcgtatcgtcagcgacaaagttaacgagatgctgaaacaagatctgattaacggtacctctaccaccgtggaaacggtgactgataagaagacaggcgaaattacccaacgcacgaaatacgggaccaaagttatggcacagtggtggttagaacacggtgtgactcgtggcgtcacgaaacgctcggttatgactttggtgtatgggagcaaagagtttggattccgcgaccaagtgctgagtgacaccattcaaaaagcgatcgataacggcaagggtgacatgtttctgaatccgaatcaggctgctggttacatggcgaaactgatctggaacgcagtgtccgggaccgtagtcgcagcagttgaggcgatgaactggctgaaaagtgcggcgaaattacttgctgctgaagtgaaggatcgtaagacggatacagttctgcgtggccgctgcgcagtacattgggtgactcccgacggcttccctgtgtggcaggaatacaagaagcctattcagacgcgcttgaacctgatgttcctcggtcagttccgcttacagcctaccattaacaccaacaaagatagcgagattgatgcacgcaaacaggtgtctggtatcgctcctaactttgtacacagcctggacggtaaccaccttcgtatgactgtagtgtgggcacacgagaagtacggaatcgaatcttttgcactgattcacgactccttcggtaccattccggctgacgctgcgaacctgttcaaagcagtgcgcgaaactttcgttgacacatatgagtcttgtgatgtactggctgatttctacgaccagattgctgaccagttgcacgagtctcaacgcgacaaaatgccagcacttccggctaaaggtaacttgaacctccgtgacatcttaaaatcggacttcgcgttcgcg

SEQ ID NO: 1794 - protein, 890 aa, synthetic construct
  REGION 1..890: note = Variant of RNA polymerase
MHHHHHHMNTINIAKNDFSDIELAAIPFNTLADHYGERLAREQLALEHESYEMGEARFRKMFERQLKAGEVADNAAAKPLITTLLPKMIARINDWFEEVKAKRGKRPTAFQFLQEIKPEAVAYITIKTTLACLTSADNRTVQAVASAIGRRIEDEARFGRIRDLEAKHFKKNVEEQLNKRVGHVYKKAFMQVVEHDMLSKGLLGGEAWSSWHKEDSIHVGVRCIEMLIESTGMVSLHRQNAGVVGQDSETIELAPEYAEAIATRAGALAGISPMFQPCVVPPKPWTGITGGGYWAAGRKPLQLVRTRGLEALRRYEEVSMPEVIKAVNIAQNTAWRINKKVLDVANTITQWKHCPVADIPAMDRGEMPARPLDIDTNEIALKAWKKEASAFYRKDKARVSRRLSMEFMLSQANKFANYEAIWFPQNMDWRGRVYAVPMFNPQGNDMTKGLLTFAQEKPIGEDGFYWLKIHGANTAGVDKVPFPQRIKFVEDNHTNIMECAKAPLENTWWAEQDSPFCFLAFCFEYAGVINSGLSYNCSLPLAFDGSCSGLQHFSAMLRDEIGGKAVNLLPSAEYQDIYRIVSDKVNEMLKQDLINGTSTTVETVTDKKTGEITQRTKYGTKVMAQWWLEHGVTRGVTKRSVMTLVYGSKEFGFRDQVLSDTIQKAIDNGKGDMFLNPNQAAGYMAKLIWNAVSGTVVAAVEAMNWLKSAAKLLAAEVKDRKTDTVLRGRCAVHWVTPDGFPVWQEYKKPIQTRLNLMFLGQFRLQPTINTNKDSEIDARKQVSGIAPNFVHSLDGNHLRMTVVWAHEKYGIESFALIHDSFGTIPADAANLFKAVRETFVDTYESCDVLADFYDQIADQLHESQRDKMPALPAKGNLNLRDILKSDFAFA

SEQ ID NO: 1795 - DNA, 2670 bp, synthetic construct
  misc_feature 1..2670: note = Variant of RNA polymerase
  source 1..2670: mol_type = other DNA
atgcaccatcaccatcaccatatgaacacgattaacattgctaagaacgacttctctgacatcgaactggctgctatcccgttcaacactctggctgaccattacggtgagcgtttagctcgcgaacagttggcccttgagcatgagtcttacgagatgggtgaagcacgcttccgcaagatgtttgagcgtcaacttaaagctggtgaggttgcggataacgctgccgccaagcctctcatcactaccctactccctaagatgattgcacgcatcaacgactggtttgaggaagtgaaagctaagcgcggcaagcgcccgacagccttccagttcctgcaagaaatcaagccggaagccgtagcgtacatcaccattaagaccactctggcttgcctaaccagtgcggacaatacaaccgttcaggctgtagcaagcgcaatcggtcgggcaattgaggacgaggctcgcttcggtcgtatccgtgaccttgaagctaagcacttcaagaagaacgttgaggaacaactcaacaagcgcgtagggcacgtctacaagaaagcatttatgcaagttgtcgagcacgacatgctctctaagggtctactcggtggcgaggcgtggtcttcgtggcataaggaagactctattcatgtaggagtacgctgcatcgagatgctcattgagtcaaccggaatggttagcttacaccgccaaaatgctggcgtagtaggtcaagactctgagactatcgaactcgcacctgaatacgctgaggctatcgcaacccgtgcaggtgcgctggctggcatctctccgatgttccaaccttgcgtagttcctcctaagccgtggactggcattactggtggtggctattgggctgcggggcgcaaacccctgcagttagtacgtactcgcagtctgtttgcgcttcgccgctatgaagaagtgtcgatgccggaggtcatcaaagcagtcaacattgcgcagaatacagcatggcgtattaacaagaaagttctcgacgtagcgaataccatcacccaatggcagcactgtccagtccgtgatatccctgcgatggatcgtggcgaaatgccagctcgtccgttggacatcgataccaacgagattgcacttaaagcgtggaagaaagaagcttccgcgttctaccgcaaagacaaagcacgcgttagccgtcgtctgtcaatggagtttatgttatctcaggcgaacaagtttgcgaattatgaggcaatctggtttccgcaaaacatggattggcgtgggcgcgtgtacgctgtcccgatgttcaatcctcagggcaacgatatgacgaaaggcctgctgacctttgcgcaggagaaacccattggtgaagacggcttctattggctcaagattcatggcgcaaatacagctggagtggataaagtaccgtttccacaacgcatcaaatttgttgaggataaccatacgaatattatggaatgcgcgaaagcaccgctggaaaacacttggtgggcggaacaggactcgccgttctgctttctggcgttctgctttgagtatgctggcgtcatcaatagtggtctgtcgtacaactgtagcttgcctctggcatttgatggtagttgctccggcctgcaacatttctcagcgatgttacgcgacgaaattggcggcaaagctgtgaatctcctcccatctgcggaataccaggatatttatcgtatcgtcagcgacaaagttaacgagatgctgaaacaagatctgattaacggtacctctaccaccgtggaaacggtgactgataagaagacaggcgaaattacccaacgcacgaaatacgggaccaaagttatggcacagtggtggttagaacacggtgtgactcgtggcgtcacgaaacgctcggttatgactttggtgtatgggagcaaagagtttggattccgcgaccaagtgaaaagtgacaccattcaaaaagcgatcgataacggcaagggtgacatgtttctgaatccgaatcaggctgctggttacatggcgaaactgatctggaacgcagtgtccgggaccgtagtcgcagcagttgaggcgatgaactggctgaaaagtgcggcgaaattacttgctgctgaagtgaaggatcgtaagacggatacagttctgcgtggccgctgcgcagtacattgggtgactcccgacggcttccctgtgtggcaggaatacaagaagcctattcagacgcgcttgaacctgatgttcctcggtcagttccgcttacagcctaccattaacaccaacaaagatagcgagattgatgcacgcaaacaggtgtctggtatcgctcctaactttgtacacagcctggacggtaaccaccttcgtatgactgtagtgtgggcacacgagaagtacggaatcgaatcttttgcactgattcacgactccttcggtaccattccggctgacgctgcgaacctgttcaaagcagtgcgcgaaactttcgttgacacatatgagtcttgtgatgtactggctgatttctacgaccagattgctgaccagttgcacgagtctcaacgcgacaaaatgccagcacttccggctaaaggtaacttgaacctccgtgacatcttaaaatcggacttcgcgttcgcg

SEQ ID NO: 1796 - protein, 890 aa, synthetic construct
  REGION 1..890: note = Variant of RNA polymerase
MHHHHHHMNTINIAKNDFSDIELAAIPFNTLADHYGERLAREQLALEHESYEMGEARFRKMFERQLKAGEVADNAAAKPLITTLLPKMIARINDWFEEVKAKRGKRPTAFQFLQEIKPEAVAYITIKTTLACLTSADNTTVQAVASAIGRAIEDEARFGRIRDLEAKHFKKNVEEQLNKRVGHVYKKAFMQVVEHDMLSKGLLGGEAWSSWHKEDSIHVGVRCIEMLIESTGMVSLHRQNAGVVGQDSETIELAPEYAEAIATRAGALAGISPMFQPCVVPPKPWTGITGGGYWAAGRKPLQLVRTRSLFALRRYEEVSMPEVIKAVNIAQNTAWRINKKVLDVANTITQWQHCPVRDIPAMDRGEMPARPLDIDTNEIALKAWKKEASAFYRKDKARVSRRLSMEFMLSQANKFANYEAIWFPQNMDWRGRVYAVPMFNPQGNDMTKGLLTFAQEKPIGEDGFYWLKIHGANTAGVDKVPFPQRIKFVEDNHTNIMECAKAPLENTWWAEQDSPFCFLAFCFEYAGVINSGLSYNCSLPLAFDGSCSGLQHFSAMLRDEIGGKAVNLLPSAEYQDIYRIVSDKVNEMLKQDLINGTSTTVETVTDKKTGEITQRTKYGTKVMAQWWLEHGVTRGVTKRSVMTLVYGSKEFGFRDQVKSDTIQKAIDNGKGDMFLNPNQAAGYMAKLIWNAVSGTVVAAVEAMNWLKSAAKLLAAEVKDRKTDTVLRGRCAVHWVTPDGFPVWQEYKKPIQTRLNLMFLGQFRLQPTINTNKDSEIDARKQVSGIAPNFVHSLDGNHLRMTVVWAHEKYGIESFALIHDSFGTIPADAANLFKAVRETFVDTYESCDVLADFYDQIADQLHESQRDKMPALPAKGNLNLRDILKSDFAFA

SEQ ID NO: 1797 - DNA, 2670 bp, synthetic construct
  misc_feature 1..2670: note = Variant of RNA polymerase
  source 1..2670: mol_type = other DNA
atgcaccatcaccatcaccatatgaacacgattaacattgctaagaacgacttctctgacatcgaactggctgctatcccgttcaacactctggctgaccattacggtgagcgtttagctcgcgaacagttggcccttgagcatgagtcttacgagatgggtgaagcacgcttccgcaagatgtttgagcgtcaacttaaagctggtgaggttgcggataacgctgccgccaagcctctcatcactaccctactccctaagatgattgcacgcatcaacgactggtttgaggaagtgaaagctaagcgcggcaagcgcccgacagccttccagttcctgcaagaaatcaagccggaagccgtagcgtacatcaccattaagacgactctggcttgcctaaccagtgcggacaatacaaccgttcaggctgtagcaagcgcaatcggtcgggccattgaggacgaggctcgcttcggtcgtatccgtgaccttgaagctaagcacttcaagaagaacgttgaggaacaactcaacaagcgcgtagggcacgtctacaagaaagcatttatgcaagttgtcgagcacgacatgctctctaagggtctactcggtggcgaggcgtggtcttcgtggcataaggaagactctattcatgtaggagtacgctgcatcgagatgctcattgagtcaaccggaatggttagcttacgtcgccaaaatgctggcgtagtaggtcaagactctgagactatcgaactcgcacctgaatacgctgaggctatcgcaacccgtgcaggtgcgctggctggcatctctccgatgttccaaccttgcgtagttcctcctaagccgtggactggcattactggtggtggctattgggctgcggggcgcaaacccctgcagttagtacgtactcgcagtcgttttgcgcttcgccgctatgaagaagtgtcgatgccggaggtcatcaaagcagtcaacattgcgcagaatacagcatggcgtattaacaagaaagttctcgacgtagcgaataccatcacccaatggcagcactgtccagtcgcggatgtgcctgcgatggatcgtggcgaaatgccagctcgtccgttggacatcgataccaacgagattgcacttaaagcgtggaagaaagaagcttccgcgttctaccgcaaagacaaagcacgcgttagccgtcgtctgtcaatggagtttatgttatctcaggcgaacaagtttgcgaattatgaggcaatctggtttccgcaaaacatggattggcgtgggcgcgtgtacgctgtcccgatgttcaatcctcagggcaacgatatgacgaaaggcctgctgacctttgcgcaggagaaacccattggtgaagacggcttctattggctcaagattcatggcgcaaatacagctggagtggataaagtaccgtttccacaacgcatcaaatttgttgaggataaccatacgaatattatggaatgcgcgaaagcaccgctggaaaacacttggtgggcggaacaggactcgccgttctgctttctggcgttctgctttgagtatgctggcgtcatcaatagtggtctgtcgtacaactgtagcttgcctctggcatttgatggtagttgctccggcctgcaacatttctcagcgatgttacgcgacgaaattggcggcaaagctgtgaatctcctcccatctgcggaataccaggatatttatcgtatcgtcagcgacaaagttaacgagatgctgaaacaagatctgattaacggtacctctaccaccgtggaaacggtgactgataagaagacaggcgaaattacccaacgcacgaaatacgggaccaaagttatggcacagtggtggttagaacacggtgtgaatcgtggcgtcacgaaacgctcggttatgactttggtgtatgggtcgaaggagtttggattccgcgatcaagtgctgagtgacaccattcaaaaagcgatcgataacggcaagggtgacatgtttctgaatccgaatcaggctgctggttacatggcgaaactgatctggaacgcagtgtccgggaccgtagtcgcagcagttgaggcgatgaactggctgaaaagtgcggcgaaattacttgctgctgaagtgaaggatcgtaagacggatacagttctgcgtggccgctgcgcagtacattgggtgactcccgacggcttccctgtgtggcaggaatacaagaagcctattcagacgcgcttgaacctgatgttcctcggtcagttccgcttacagcctaccattaacaccaacaaagatagcgagattgatgcacgcaaacaggtgtctggtatcgctcctaactttgtacacagcctggacggtaaccaccttcgtatgactgtagtgtgggcacacgagaagtacggaatcgaatcttttgcactgattcacgactccttcggtaccattccggctgacgctgcgaacctgttcaaagcagtgcgcgaaactttcgttgacacatatgagtcttgtgatgtactggctgatttctacgaccagattgctgaccagttgcacgagtctcaacgcgacaaaatgccagcacttccggctaaaggtaacttgaacctccgtgacatcttaaaatcggacttcgcgttcgcg

SEQ ID NO: 1798 - protein, 890 aa, synthetic construct
  REGION 1..890: note = Variant of RNA polymerase
MHHHHHHMNTINIAKNDFSDIELAAIPFNTLADHYGERLAREQLALEHESYEMGEARFRKMFERQLKAGEVADNAAAKPLITTLLPKMIARINDWFEEVKAKRGKRPTAFQFLQEIKPEAVAYITIKTTLACLTSADNTTVQAVASAIGRAIEDEARFGRIRDLEAKHFKKNVEEQLNKRVGHVYKKAFMQVVEHDMLSKGLLGGEAWSSWHKEDSIHVGVRCIEMLIESTGMVSLRRQNAGVVGQDSETIELAPEYAEAIATRAGALAGISPMFQPCVVPPKPWTGITGGGYWAAGRKPLQLVRTRSRFALRRYEEVSMPEVIKAVNIAQNTAWRINKKVLDVANTITQWQHCPVADVPAMDRGEMPARPLDIDTNEIALKAWKKEASAFYRKDKARVSRRLSMEFMLSQANKFANYEAIWFPQNMDWRGRVYAVPMFNPQGNDMTKGLLTFAQEKPIGEDGFYWLKIHGANTAGVDKVPFPQRIKFVEDNHTNIMECAKAPLENTWWAEQDSPFCFLAFCFEYAGVINSGLSYNCSLPLAFDGSCSGLQHFSAMLRDEIGGKAVNLLPSAEYQDIYRIVSDKVNEMLKQDLINGTSTTVETVTDKKTGEITQRTKYGTKVMAQWWLEHGVNRGVTKRSVMTLVYGSKEFGFRDQVLSDTIQKAIDNGKGDMFLNPNQAAGYMAKLIWNAVSGTVVAAVEAMNWLKSAAKLLAAEVKDRKTDTVLRGRCAVHWVTPDGFPVWQEYKKPIQTRLNLMFLGQFRLQPTINTNKDSEIDARKQVSGIAPNFVHSLDGNHLRMTVVWAHEKYGIESFALIHDSFGTIPADAANLFKAVRETFVDTYESCDVLADFYDQIADQLHESQRDKMPALPAKGNLNLRDILKSDFAFA

SEQ ID NO: 1799 - DNA, 2670 bp, synthetic construct
  misc_feature 1..2670: note = Variant of RNA polymerase
  source 1..2670: mol_type = other DNA
atgcaccatcaccatcaccatatgaacacgattaacattgctaagaacgacttctctgacatcgaactggctgctatcccgttcaacactctggctgaccattacggtgagcgtttagctcgcgaacagttggcccttgagcatgagtcttacgagatgggtgaagcacgcttccgcaagatgtttgagcgtcaacttaaagctggtgaggttgcggataacgctgccgccaagcctctcatcactaccctactccctaagatgattgcacgcatcaacgactggtttgaggaagtgaaagctaagcgcggcaagcgcccgacagccttccagttcctgcaagaaatcaagccggaagccgtagcgtacatcaccattaagacgactctggcttgcctaaccagtgcggacaatacaaccgttcaggctgtagcaagcgcaatcggtcgggccattgaggacgaggctcgcttcggtcgtatccgtgaccttgaagctaagcacttcaagaagaacgttgaggaacaactcaacaagcgcgtagggcacgtctacaagaaagcatttatgcaagttgtcgagcacgacatgctctctaagggtctactcggtggcgaggcgtggtcttcgtggcataaggaagactctattcatgtaggagtacgctgcatcgagatgctcattgagtcaaccggaatggttagcttacgtcgccaaaatgctggcgtagtaggtcaagactctgagacgatcgaactcgcacctgaatacgctgaggctatcgcaacccgtgcaggtgcgctggctggcatctctccgatgttccaaccttgcgtagttcctcctaagccgtggactggcattactggtggtggctattgggctgcggggcgcaaacccctgcagttagtacgtactcgcggtctgcacgcgcttcgccgctatgaagaagtgtcgatgccggaggtcatcaaagcagtcaacattgcgcagaatacagcatggcgtattaacaagaaagttctcgacgtagcgaataccatcacccaatggcagcactgtccagtcgctgatgtgcctgcgatggatcgtggcgaaatgccagctcgtccgttggacatcgataccaacgagattgcacttaaagcgtggaagaaagaggcttccgcgttctaccgcaaagacaaagcacgcgttagccgtcgtctgtcaatggagtttatgttatctcaggcgaacaagtttgcgaattatgaggcaatctggtttccgcaaaacatggattggcgtgggcgcgtgtacgctgtcccgatgttcaatcctcagggcaacgatatgacgaaaggcctgctgacctttgcgcaggagaaacccattggtgaagacggcttctattggctcaagattcatggcgcaaatacagctggagtggataaagtaccgtttccacaacgcatcaaatttgttgaggataaccatacgaatattatggaatgcgcgaaagcaccgctggaaaacacttggtgggcggaacaggactcgccgttctgctttctggcgttctgctttgagtatgctggcgtcatcaatagtggtctgtcgtacaactgtagcttgcctctggcatttgatggtagttgctccggcctgcaacatttctcagcgatgttacgcgacgaaattggcggcaaagctgtgaatctcctcccatctgcggaataccaggatatttatcgtatcgtcagcgacaaagttaacgagatgctgaaacaagatctgattaacggtacctctaccaccgtggaaacggtgactgataagaagacaggcgaaattacccaacgcacgaaatacgggaccaaagttatggcacagtggtggttagaacacggtgtgactcgtggcgtcacgaaacgctcggttatgactttggtgtatgggtcgaaggagtttggattccgcgatcaagtgctgagtgacaccattcaaaaagcgatcgataacggcaagggtgacatgtttctgaatccgaatcaggctgctggttacatggcgaaactgatctggaacgcagtgtccgggaccgtagtcgcagcagttgaggcgatgaactggctgaaaagtgcggcgaaattacttgctgctgaagtgaaggatcgtaagacggatacagttctgcgtggccgctgcgcagtacattgggtgactcccgacggcttccctgtgtggcaggaatacaagaagcctattcagacgcgcttgaacctgatgttcctcggtcagttccgcttacagcctaccattaacaccaacaaagatagcgagattgatgcacgcaaacaggtgtctggtatcgctcctaactttgtacacagcctggacggtaaccaccttcgtatgactgtagtgtgggcacacgagaagtacggaatcgaatcttttgcactgattcacgactccttcggtaccattccggctgacgctgcgaacctgttcaaagcagtgcgcgaaactttcgttgacacatatgagtcttgtgatgtactggctgatttctacgaccagattgctgaccagttgcacgagtctcaacgcgacaaaatgccagcacttccggctaaaggtaacttgaacctccgtgacatcttaaaatcggacttcgcgttcgcg

SEQ ID NO: 1800 - protein, 890 aa, synthetic construct
  REGION 1..890: note = Variant of RNA polymerase
MHHHHHHMNTINIAKNDFSDIELAAIPFNTLADHYGERLAREQLALEHESYEMGEARFRKMFERQLKAGEVADNAAAKPLITTLLPKMIARINDWFEEVKAKRGKRPTAFQFLQEIKPEAVAYITIKTTLACLTSADNTTVQAVASAIGRAIEDEARFGRIRDLEAKHFKKNVEEQLNKRVGHVYKKAFMQVVEHDMLSKGLLGGEAWSSWHKEDSIHVGVRCIEMLIESTGMVSLRRQNAGVVGQDSETIELAPEYAEAIATRAGALAGISPMFQPCVVPPKPWTGITGGGYWAAGRKPLQLVRTRGLHALRRYEEVSMPEVIKAVNIAQNTAWRINKKVLDVANTITQWQHCPVADVPAMDRGEMPARPLDIDTNEIALKAWKKEASAFYRKDKARVSRRLSMEFMLSQANKFANYEAIWFPQNMDWRGRVYAVPMFNPQGNDMTKGLLTFAQEKPIGEDGFYWLKIHGANTAGVDKVPFPQRIKFVEDNHTNIMECAKAPLENTWWAEQDSPFCFLAFCFEYAGVINSGLSYNCSLPLAFDGSCSGLQHFSAMLRDEIGGKAVNLLPSAEYQDIYRIVSDKVNEMLKQDLINGTSTTVETVTDKKTGEITQRTKYGTKVMAQWWLEHGVTRGVTKRSVMTLVYGSKEFGFRDQVLSDTIQKAIDNGKGDMFLNPNQAAGYMAKLIWNAVSGTVVAAVEAMNWLKSAAKLLAAEVKDRKTDTVLRGRCAVHWVTPDGFPVWQEYKKPIQTRLNLMFLGQFRLQPTINTNKDSEIDARKQVSGIAPNFVHSLDGNHLRMTVVWAHEKYGIESFALIHDSFGTIPADAANLFKAVRETFVDTYESCDVLADFYDQIADQLHESQRDKMPALPAKGNLNLRDILKSDFAFA

SEQ ID NO: 1801 - DNA, 2670 bp, synthetic construct
  misc_feature 1..2670: note = Variant of RNA polymerase
  source 1..2670: mol_type = other DNA
atgcaccatcaccatcaccatatgaacacgattaacattgctaagaacgacttctctgacatcgaactggctgctatcccgttcaacactctggctgaccattacggtgagcgtttagctcgcgaacagttggcccttgagcatgagtcttacgagatgggtgaagcacgcttccgcaagatgtttgagcgtcaacttaaagctggtgaggttgcggataacgctgccgccaagcctctcatcactaccctactccctaagatgattgcacgcatcaacgactggtttgaggaagtgaaagctaagcgcggcaagcgcccgacagccttccagttcctgcaagaaatcaagccggaagccgtagcgtacatcaccattaagaccactctggcttgcctaaccagtgcggacaatcgtagtgttcaggctgtggcaagcgcaatcggtcgggccattgaggacgaggctcgcttcggtcgtatccgtgaccttgaagctaagcacttcaagaagaacgttgaggaacaactcaacaagcgcgtagggcacgtctacaagaaagcatttatgcaagttgtcgagcacgacatgctctctaagggtctactcggtggcgaggcgtggtcttcgtggcataaggaagactctattcatgtaggagtacgctgcatcgagatgctcattgagtcaaccggaatggttagcttacaccgccaaaatgctggcgtagtaggtcaagactctgagcgtatcgaactcgcacctgaatacgctgaggctatcgcaacccgtgcaggtgcgctggctggcatctctccgatgttccaaccttgcgtagttcctcctaagccgtggactggcattactggtggtggctattgggctgcggggcgcaaacccctgcagttagtacgtactcgcagtctggcggcgcttcgccgctatgaagaagtgtcgatgccggaggtcatcaaagcagtcaacattgcgcagaatacagcatggcgtattaacaagaaagttctcgacgtagcgaataccatcacccaatggaaacactgtccagtcgctgatatccctgcgatggatcgtggcgaaatgccagctcgtccgttggacatcgataccaacgagattgcacttaaagcgtggaagaaagaagcttccgcgttctaccgcaaagacaaagcacgcgttagccgtcgtctgtcaatggagtttatgttatctcaggcgaacaagtttgcgaattatgaggcaatctggtttccgcaaaacatggattggcgtgggcgcgtgtacgctgtcccgatgttcaatcctcagggcaacgatatgacgaaaggcctgctgacctttgcgcaggagaaacccattggtgaagacggcttctattggctcaagattcatggcgcaaatacagctggagtggataaagtaccgtttccacaacgcatcaaatttgttgaggataaccatacgaatattatggaatgcgcgaaagcaccgctggaaaacacttggtgggcggaacaggactcgccgttctgctttctggcgttctgctttgagtatgctggcgtcatcaatagtggtctgtcgtacaactgtagcttgcctctggcatttgatggtagttgctccggcctgcaacatttctcagcgatgttacgcgacgaaattggcggcaaagctgtgaatctcctcccatctgcggaataccaggatatttatcgtatcgtcagcgacaaagttaacgagatgctgaaacaagatctgattaacggtacctctaccaccgtggaaacggtgactgataagaagacaggcgaaattacccaacgcacgaaatacgggaccaaagttatggcacagtggtggttagaacacggtgtgactcgtggcgtcacgaaacgctcggttatgactttggtgtatggggcgctggagtttggattccgcgatcaagtgctgaaggacaccgtcgggaaagcgatcgataacggcaagggtgacatgtttctgaatccgaatcaggctgctggttacatggcgaaactgatctggaacgcagtgtccgggaccgtagtcgcagcagttgaggcgatgaactggctgaaaagtgcggcgaaattacttgctgctgaagtgaaggatcgtaagacggatacagttctgcgtggccgctgcgcagtacattgggtgactcccgacggcttccctgtgcaccaggaatacaagaagcctattcagacgcgcttgaacctgatgttcctcggtcagttccgcttacagcctaccattaacaccaacaaagatagcgagattgatgcacgcaaacagatgtctgctatcgctcctaactttgtacacagctttgacgggaaccaccttcgtatgactgtagtgtgggcacacgagaagtacggaatcgaatcttttgcactgattcacgactccttcggtaccattccggctgacgctgcgaacctgttcaaagcagtgcgcgaaactttcgttgacacatatgagtcttgtgatgtactggctgatttctacgaccagattgctgaccagttgcacgagtctcaacgcgacaaaatgccagcacttccggctaaaggtaacttgaacctccgtgacatcttaaaatcggacttcgcgttcgcg

SEQ ID NO: 1802 - protein, 890 aa, synthetic construct
  REGION 1..890: note = Variant of RNA polymerase
MHHHHHHMNTINIAKNDFSDIELAAIPFNTLADHYGERLAREQLALEHESYEMGEARFRKMFERQLKAGEVADNAAAKPLITTLLPKMIARINDWFEEVKAKRGKRPTAFQFLQEIKPEAVAYITIKTTLACLTSADNRSVQAVASAIGRAIEDEARFGRIRDLEAKHFKKNVEEQLNKRVGHVYKKAFMQVVEHDMLSKGLLGGEAWSSWHKEDSIHVGVRCIEMLIESTGMVSLHRQNAGVVGQDSERIELAPEYAEAIATRAGALAGISPMFQPCVVPPKPWTGITGGGYWAAGRKPLQLVRTRSLAALRRYEEVSMPEVIKAVNIAQNTAWRINKKVLDVANTITQWKHCPVADIPAMDRGEMPARPLDIDTNEIALKAWKKEASAFYRKDKARVSRRLSMEFMLSQANKFANYEAIWFPQNMDWRGRVYAVPMFNPQGNDMTKGLLTFAQEKPIGEDGFYWLKIHGANTAGVDKVPFPQRIKFVEDNHTNIMECAKAPLENTWWAEQDSPFCFLAFCFEYAGVINSGLSYNCSLPLAFDGSCSGLQHFSAMLRDEIGGKAVNLLPSAEYQDIYRIVSDKVNEMLKQDLINGTSTTVETVTDKKTGEITQRTKYGTKVMAQWWLEHGVTRGVTKRSVMTLVYGALEFGFRDQVLKDTVGKAIDNGKGDMFLNPNQAAGYMAKLIWNAVSGTVVAAVEAMNWLKSAAKLLAAEVKDRKTDTVLRGRCAVHWVTPDGFPVHQEYKKPIQTRLNLMFLGQFRLQPTINTNKDSEIDARKQMSAIAPNFVHSFDGNHLRMTVVWAHEKYGIESFALIHDSFGTIPADAANLFKAVRETFVDTYESCDVLADFYDQIADQLHESQRDKMPALPAKGNLNLRDILKSDFAFA

SEQ ID NO: 1803 - DNA, 2670 bp, synthetic construct
  misc_feature 1..2670: note = Variant of RNA polymerase
  source 1..2670: mol_type = other DNA
atgcaccatcaccatcaccatatgaacacgattaacattgctaagaacgacttctctgacatcgaactggctgctatcccgttcaacactctggctgaccattacggtgagcgtttagctcgcgaacagttggcccttgagcatgagtcttacgagatgggtgaagcacgcttccgcaagatgtttgagcgtcaacttaaagctggtgaggttgcggataacgctgccgccaagcctctcatcactaccctactccctaagatgattgcacgcatcaacgactggtttgaggaagtgaaagccaagcgcggcaagcgcccgacagccttccagttcctgcaagaaatcaagccggaagccgtagcgtacatcaccattaagaccgtgctggctctgctaaccagtgcggacaatacaaccgttcaggctgtagcaagcgcaatcggtaaagccattgaggacgaggctcgcttcggtcgtatccgtgaccttgaagctaagcacttcaagaagaacgttgaggaacaactcaacaagcgcgtagggcacgtctacaagaaagcatttatgcaagttgtcgagcacgacatgctctctaagggtctactcgggggcgtggtatggccgtcgtggcataaggaagactctattcatgtaggagtacgctgcatcgagatgctcattgagtcaaccggaatggttagcttacaccgccaaaatgctggcgtagtaggtcaagactctgagcgtatcgaactcgcacctgaatacgctgaggctatcgcaacccgtgcaggtgcgctggctggcatctctccgatgttccaaccttgcgtagttcctcctaagccgtggactggcattactggtggtggctattgggctgcggggcgcaaacccctgcagttagtacgtactcgcagtctggcggcacttcgccgctatgaagaagtgtcgatgccggaggtcatcaaagcagtcaacattgcgcagaatacagcatggcgtattaacaagaaagttctcgacgtagcgaataccatcacccaatggaaacactgtccagtccgcgatatccctgcgatggatcgtggcgaaatgccagctcgtccgttggacatcgataccaacgagattgcacttaaagcgtggaagaaagaagcttccgcgttctaccgcaaagacaaagcacgcgttagccgtcgtctgtcaatggagtttatgttatctcaggcgaacaagtttgcgaattatgaggcaatctggtttccgtggaacatggattggcgtgggcgcgtgtacgctgtcccgatgttcaatcctcagggcaacgatatgacgaaaggcctgctgacctttgcgcaggagaaacccattggtgaagacggcttctattggctcaagattcatggcgcaaatacagctggagtggataaagtaccgtttccacaacgcatcaaatttgttgaggataaccatacgaatattatggaatgcgcgaaagcaccgctggaaaacacttggtgggcggaacaggactcgccgttctgctttctggcgttctgctttgagtatgctggcgtcatcaatagtggtctgtcgtacaactgtagcttgcctatggcattcgatggtagttgctccggcctgcaacatttctcagcgatgttacgcgacgaaattggcggcaaagctgtgaatctcctcccatctgcggaataccaggatatttatcgtatcgtcagcgacaaagttaacgagatgctgaaacaagatctgattaacggtacctctaccaccgtggaaacggtgactgataagaagacaggcgaaattacccaacgcacgaaatacgggaccaaagttatggcacagtggtggttagaacacggtgtgaatcgtggcgtcacgaaacgctcggttatgactttggtgtatggggcgctggagtttggattccgcgatcaagtgctgagtgacaccattcaaaaagcgatcgataacggcaagggtgacatgtttctgaatccgaatcaggctgctggttacatggcgaaactgatctggaacgcagtgtccgggaccgtagtcgcagcagttgaggcgatgaactggctgaaaagtgcggcgaaattacttgctgctgaagtgaaggatcgtaagacggatacagttctgcgtggccgctgcgcagtacattgggtgactcccgacggcttccctgtgtggcaggaatacaagaagcctattcagacgcgcttgaacctgatgttcctcggtcagttccgcttacagcctaccattaacaccaacaaagatagcgagattgatgtgcgcaaacaggtgtctggtatcgctcctaactttgtacacagcctggacggtaaccaccttcgtatgactgtagtgtgggcacacgagaagtacggaatcgaatcttttgcactgattcacgactccttcggtaccattccggctgacgctgcgaacctgttcaaagcagtgcgcgaaactttcgttgacacatatgagtcttgtgatgtactggctgatttctacgaccagattgctgaccagttgcacgagtctcaacgcgacaaaatgccagcacttccggctaaaggtaacttgaacctccgtgacatcttaaaatcggacttcgcgttcgcg

SEQ ID NO: 1804 - protein, 890 aa, synthetic construct
  REGION 1..890: note = Variant of RNA polymerase
MHHHHHHMNTINIAKNDFSDIELAAIPFNTLADHYGERLAREQLALEHESYEMGEARFRKMFERQLKAGEVADNAAAKPLITTLLPKMIARINDWFEEVKAKRGKRPTAFQFLQEIKPEAVAYITIKTVLALLTSADNTTVQAVASAIGKAIEDEARFGRIRDLEAKHFKKNVEEQLNKRVGHVYKKAFMQVVEHDMLSKGLLGGVVWPSWHKEDSIHVGVRCIEMLIESTGMVSLHRQNAGVVGQDSERIELAPEYAEAIATRAGALAGISPMFQPCVVPPKPWTGITGGGYWAAGRKPLQLVRTRSLAALRRYEEVSMPEVIKAVNIAQNTAWRINKKVLDVANTITQWKHCPVRDIPAMDRGEMPARPLDIDTNEIALKAWKKEASAFYRKDKARVSRRLSMEFMLSQANKFANYEAIWFPWNMDWRGRVYAVPMFNPQGNDMTKGLLTFAQEKPIGEDGFYWLKIHGANTAGVDKVPFPQRIKFVEDNHTNIMECAKAPLENTWWAEQDSPFCFLAFCFEYAGVINSGLSYNCSLPMAFDGSCSGLQHFSAMLRDEIGGKAVNLLPSAEYQDIYRIVSDKVNEMLKQDLINGTSTTVETVTDKKTGEITQRTKYGTKVMAQWWLEHGVNRGVTKRSVMTLVYGALEFGFRDQVLSDTIQKAIDNGKGDMFLNPNQAAGYMAKLIWNAVSGTVVAAVEAMNWLKSAAKLLAAEVKDRKTDTVLRGRCAVHWVTPDGFPVWQEYKKPIQTRLNLMFLGQFRLQPTINTNKDSEIDVRKQVSGIAPNFVHSLDGNHLRMTVVWAHEKYGIESFALIHDSFGTIPADAANLFKAVRETFVDTYESCDVLADFYDQIADQLHESQRDKMPALPAKGNLNLRDILKSDFAFA

SEQ ID NO: 1805 - DNA, 2670 bp, synthetic construct
  misc_feature 1..2670: note = Variant of RNA polymerase
  source 1..2670: mol_type = other DNA
atgcaccatcaccatcaccatatgaacacgattaacattgctaagaacgacttctctgacatcgaactggctgctatcccgttcaacactctggctgaccattacggtgagcgtttagctcgcgaacagttggcccttgagcatgagtcttacgagatgggtgaagcacgcttccgcaagatgtttgagcgtcaacttaaagctggtgaggttgcggataacgctgccgccaagcctctcatcactaccctactccctaagatgattgcacgcatcaacgactggtttgaggaagtgaaacgcaagcgcggcaagcgcccgacagccttccagttcctgcaagaaatcaagccggaagccgtagcgtacatcaccattaagaccgtgctggctctgctaaccagtgcggacaatacaaccgttcaggctgtagcaagcgcaatcggtaaagccattgaggacgaggctcgcttcggtcgtatccgtgaccttgaagctaagcacttcaagaagaacgttgaggaacaactcaacaagcgcgtagggcacgtctacaagaaagcatttatgcaagttgtcgagcacgacatgctctctaagggtctactcgggggcgtggcatgggaatcgtggcataaggaagactctattcatgtaggagtacgctgcatcgagatgctcattgagtcaaccggaatggttagcttacaccgccaaaatgctggcgtagtaggtcaagactctgagcgtatcgaactcgcacctgaatacgctgaggctatcgcaacccgtgcaggtgcgctggctggcatctctccgatgttccaaccttgcgtagttcctcctaagccgtggactggcattactggtggtggctattgggctgcggggcgcaaacccctgcagttagtacgtactcgcagtctggcggcgcttcgccgctatgaagaagtgtcgatgccggaggtcatcaaagcagtcaacattgcgcagaatacagcatggcgtattaacaagaaagttctcgacgtagcgaataccatcacccaatggaaacactgtccagtccgcgatatccctgcgatggatcgtggcgaaatgccagctcgtccgttggacatcgataccaacgagattgcacttaaagcgtggaagaaagaagcttccgcgttctaccgcaaagacaaagcacgcgttagccgtcgtctgtcaatggagtttatgttatctcaggcgaacaagtttgcgaattatgaggcaatctggtttccgtggaacatggattggcgtgggcgcgtgtacgctgtcccgatgttcaatcctcagggcaacgatatgacgaaaggcctgctgacctttgcgcaggagaaacccattggtgaagacggcttctattggctcaagattcatggcgcaaatacagctggagtggataaagtaccgtttccacaacgcatcaaatttgttgaggataaccatacgaatattatggaatgcgcgaaagcaccgctggaaaacacttggtgggcggaacaggactcgccgttctgctttctggcgttctgctttgagtatgctggcgtcatcaatagtggtctgtcgtacaactgtagcttgcctctggcattcgatggtagttgctccggcctgcaacatttctcagcgatgttacgcgacgaaattggcggcaaagctgtgaatctcctcccatctgcggaataccaggatatttatcgtatcgtcagcgacaaagttaacgagatgctgaaacaagatctgattaacggtacctctaccaccgtggaaacggtgactgataagaagacaggcgaaattacccaacgcacgaaatacgggaccaaagttatggcacagtggtggttagaacacggtgtgaatcgtggcgtcacgaaacgctcggttatgactttggtgtatggggcgctggagtttggattccgcgatcaagtgctgagtgacaccattcaaaaagcgatcgataacggcaagggtgacatgtttctgaatccgaatcaggctgctggttacatggcgaaactgatctggaacgcagtgtccgggaccgtagtcgcagcagttgaggcgatgaactggctgaaaagtgcggcgaaattacttgctgctgaagtgaaggatcgtaagacggatacagttctgcgtggccgctgcgcagtacattgggtgactcccgacggcttccctgtgtggcaggaatacaagaagcctattcagacgcgcttgaacctgatgttcctcggtcagttccgcttacagcctaccattaacaccaacaaagatagcgagattgatgtgcgcaaacaggtgtctggtatcgctcctaactttgtacacagcctggacggtaaccaccttcgtatgactgtagtgtgggcacacgagaagtacggaatcgaatcttttgcactgattcacgactccttcggtaccattccggctgacgctgcgaacctgttcaaagcagtgcgcgaaactttcgttgacacatatgagtcttgtgatgtactggctgatttctacgaccagattgctgaccagttgcacgagtctcaacgcgacaaaatgccagcacttccggctaaaggtaacttgaacctccgtgacatcttaaaatcggacttcgcgttcgcg

SEQ ID NO: 1806 - protein, 890 aa, synthetic construct
  REGION 1..890: note = Variant of RNA polymerase
MHHHHHHMNTINIAKNDFSDIELAAIPFNTLADHYGERLAREQLALEHESYEMGEARFRKMFERQLKAGEVADNAAAKPLITTLLPKMIARINDWFEEVKRKRGKRPTAFQFLQEIKPEAVAYITIKTVLALLTSADNTTVQAVASAIGKAIEDEARFGRIRDLEAKHFKKNVEEQLNKRVGHVYKKAFMQVVEHDMLSKGLLGGVAWESWHKEDSIHVGVRCIEMLIESTGMVSLHRQNAGVVGQDSERIELAPEYAEAIATRAGALAGISPMFQPCVVPPKPWTGITGGGYWAAGRKPLQLVRTRSLAALRRYEEVSMPEVIKAVNIAQNTAWRINKKVLDVANTITQWKHCPVRDIPAMDRGEMPARPLDIDTNEIALKAWKKEASAFYRKDKARVSRRLSMEFMLSQANKFANYEAIWFPWNMDWRGRVYAVPMFNPQGNDMTKGLLTFAQEKPIGEDGFYWLKIHGANTAGVDKVPFPQRIKFVEDNHTNIMECAKAPLENTWWAEQDSPFCFLAFCFEYAGVINSGLSYNCSLPLAFDGSCSGLQHFSAMLRDEIGGKAVNLLPSAEYQDIYRIVSDKVNEMLKQDLINGTSTTVETVTDKKTGEITQRTKYGTKVMAQWWLEHGVNRGVTKRSVMTLVYGALEFGFRDQVLSDTIQKAIDNGKGDMFLNPNQAAGYMAKLIWNAVSGTVVAAVEAMNWLKSAAKLLAAEVKDRKTDTVLRGRCAVHWVTPDGFPVWQEYKKPIQTRLNLMFLGQFRLQPTINTNKDSEIDVRKQVSGIAPNFVHSLDGNHLRMTVVWAHEKYGIESFALIHDSFGTIPADAANLFKAVRETFVDTYESCDVLADFYDQIADQLHESQRDKMPALPAKGNLNLRDILKSDFAFA

SEQ ID NO: 1807 - DNA, 2670 bp, synthetic construct
  misc_feature 1..2670: note = Variant of RNA polymerase
  source 1..2670: mol_type = other DNA
atgcaccatcaccatcaccatatgaacacgattaacattgctaagaacgacttctctgacatcgaactggctgctatcccgttcaacactctggctgaccattacggtgagcgtttagctcgcgaacagttggcccttgagcatgagtcttacgagatgggtgaagcacgcttccgcaagatgtttgagcgtcaacttaaagctggtgaggttgcggataacgctgccgccaagcctctcatcactaccctactccctaagatgattgcacgcatcaacgactggtttgaggaagtgaaagccaagcgcggcaagcgcccgacagccttccagttcctgcaagaaatcaagccggaagccgtagcgtacatcaccattaagaccactctggctgtcctaaccagtgcggacaatacaaccgttcaggctgtagcaagcgcaatcggtaaagccattgaggacgaggctcgcttcggtcgtatccgtgaccttgaagctaagcacttcaagaagaacgttgaggaacaactcaacaagcgcgtagggcacgtctacaagaaagcatttatgcaagttgtcgagcacgacatgctctctaagggtctactcgggggcgtggtatggtcgtcgtggcataaggaagactctattcatgtaggagtacgctgcatcgagatgctcattgagtcaaccggaatggttagcttacaccgccaaaatgctggcgtagtaggtcaagactctgagcgtatcgaactcgcacctgaatacgctgaggctatcgcaacccgtgcaggtgcgctggctggcatctctccgatgttccaaccttgcgtagttcctcctaagccgtggactggcattactggtggtggctattgggctgcggggcgcaaacccctgcagttagtacgtactcgcagtctggcggtacttcgccgctatgaagaagtgtcgatgccggaggtcatcaaagcagtcaacattgcgcagaatacagcatggcgtattaacaagaaagttctcgacgtagcgaataccatcacccaatggaaacactgtccagtccgcgatatccctgcgatggatcgtggcgaaatgccagctcgtccgttggacatcgataccaacgagattgcacttaaagcgtggaagaaagaagcttccgcgttctaccgcaaagacaaagcacgcgttagccgtcgtctgtcaatggagtttatgttatctcaggcgaacaagtttgcgaattatgaggcaatctggtttccgcaaaacatggattggcgtgggcgcgtgtacgctgtcccgatgttcaatcctcagggcaacgatatgacgaaaggcctgctgacctttgcgcaggagaaacccattggtgaagacggcttctattggctcaagattcatggcgcaaatacagctggagtggataaagtaccgtttccacaacgcatcaaatttgttgaggataaccatacgaatattatggaatgcgcgaaagcaccgctggaaaacacttggtgggcggaacaggactcgccgttctgctttctggcgttctgctttgagtatgctggcgtcatcaatagtggtctgtcgtacaactgtagcttgcctctggcattcgatggtagttgctccggcctgcaacatttctcagcgatgttacgcgacgaaattggcggcaaagctgtgaatctcctcccatctgcggaataccaggatatttatcgtatcgtcagcgacaaagttaacgagatgctgaaacaagatctgattaacggtacctctaccaccgtggaaacggtgactgataagaagacaggcgaaattacccaacgcacgaaatacgggaccaaagttatggcacagtggtggttagaacacggtgtgaatcgtggcgtcacgaaacgctcggttatgactttggtgtatggggcgctggagtttggattccgcgatcaagtgctgagtgacaccattcaaaaagcgatcgataacggcaagggtgacatgtttctgaatccgaatcaggctgctggttacatggcgaaactgatctggaacgcagtgtccgggaccgtagtcgcagcagttgaggcgatgaactggctgaaaagtgcggcgaaattacttgctgctgaagtgaaggatcgtaagacggatacagttctgcgtggccgctgcgcagtacattgggtgactcccgacggcttccctgtgtggcaggaatacaagaagcctattcagacgcgcttgaacctgatgttcctcggtcagttccgcttacagcctaccattaacaccaacaaagatagcgagattgatgtgcgcaaacaggtgtctggtatcgctcctaactttgtacacagcctggacggtaaccaccttcgtatgactgtagtgtgggcacacgagaagtacggaatcgaatcttttgcactgattcacgactccttcggtaccattccggctgacgctgcgaacctgttcaaagcagtgcgcgaaactttcgttgacacatatgagtcttgtgatgtactggctgatttctacgaccagattgctgaccagttgcacgagtctcaacgcgacaaaatgccagcacttccggctaaaggtaacttgaacctccgtgacatcttaaaatcggacttcgcgttcgcg

SEQ ID NO: 1808 - protein, 890 aa, synthetic construct
  REGION 1..890: note = Variant of RNA polymerase
MHHHHHHMNTINIAKNDFSDIELAAIPFNTLADHYGERLAREQLALEHESYEMGEARFRKMFERQLKAGEVADNAAAKPLITTLLPKMIARINDWFEEVKAKRGKRPTAFQFLQEIKPEAVAYITIKTTLAVLTSADNTTVQAVASAIGKAIEDEARFGRIRDLEAKHFKKNVEEQLNKRVGHVYKKAFMQVVEHDMLSKGLLGGVVWSSWHKEDSIHVGVRCIEMLIESTGMVSLHRQNAGVVGQDSERIELAPEYAEAIATRAGALAGISPMFQPCVVPPKPWTGITGGGYWAAGRKPLQLVRTRSLAVLRRYEEVSMPEVIKAVNIAQNTAWRINKKVLDVANTITQWKHCPVRDIPAMDRGEMPARPLDIDTNEIALKAWKKEASAFYRKDKARVSRRLSMEFMLSQANKFANYEAIWFPQNMDWRGRVYAVPMFNPQGNDMTKGLLTFAQEKPIGEDGFYWLKIHGANTAGVDKVPFPQRIKFVEDNHTNIMECAKAPLENTWWAEQDSPFCFLAFCFEYAGVINSGLSYNCSLPLAFDGSCSGLQHFSAMLRDEIGGKAVNLLPSAEYQDIYRIVSDKVNEMLKQDLINGTSTTVETVTDKKTGEITQRTKYGTKVMAQWWLEHGVNRGVTKRSVMTLVYGALEFGFRDQVLSDTIQKAIDNGKGDMFLNPNQAAGYMAKLIWNAVSGTVVAAVEAMNWLKSAAKLLAAEVKDRKTDTVLRGRCAVHWVTPDGFPVWQEYKKPIQTRLNLMFLGQFRLQPTINTNKDSEIDVRKQVSGIAPNFVHSLDGNHLRMTVVWAHEKYGIESFALIHDSFGTIPADAANLFKAVRETFVDTYESCDVLADFYDQIADQLHESQRDKMPALPAKGNLNLRDILKSDFAFA

SEQ ID NO: 1809 - DNA, 2670 bp, synthetic construct
  misc_feature 1..2670: note = Variant of RNA polymerase
  source 1..2670: mol_type = other DNA
atgcaccatcaccatcaccatatgaacacgattaacattgctaagaacgacttctctgacatcgaactggctgctatcccgttcaacactctggctgaccattacggtgagcgtttagctcgcgaacagttggcccttgagcatgagtcttacgagatgggtgaagcacgcttccgcaagatgtttgagcgtcaacttaaagctggtgaggttgcggataacgctgccgccaagcctctcatcactaccctactccctaagatgattgcacgcatcaacgactggtttgaggaagtgaaagctaagcgcggcaagcgcccgacagccttccagttcctgcaagaaatcaagccggaagccgtagcgtacatcaccattaagaccactctggcttgcctaaccagtgcggacaatacgcgtgttcaggctgtggcaagcgcaatcggtcgggccattgaggacgaggctcgcttcggtcgtatccgtgaccttgaagctaagcacttcaagaagaacgttgaggaacaactcaacaagcgcgtagggcacgtctacaagaaagcatttatgcaagttgtcgagcacgacatgctctctaagggtctactcggtggcggggcgtggtctatgtggcataaggaagactctattcatgtaggagtacgctgcatcgagatgctcattgagtcaaccggaatggttagcttacaccgccaaaatgctggcgtagtaggtcaagactctgagcgtatcgaactcgcacctgaatacgctgaggctatcgcaacccgtgcaggtgcgctggctggcatctctccgatgttccaaccttgcgtagttcctcctaagccgtggactggcattactggtggtggctattgggctgcggggcgcaaacccctgcagttagtacgtactcgcagtctggcggcgcttcgccgctatgaagaagtgtcgatgccggaggtcatcaaagcagtcaacattgcgcagaatacagcatggcgtattaacaagaaagttctcgacgtagcgaataccatcacccaatggaaacactgtccagtcgctgatatccctgcgatggatcgtggcgaaatgccagctcgtccgttggacatcgataccaacgagattgcacttaaagcgtggaagaaagaagcttccgcgttctaccgcaaagacaaagcacgcgttagccgtcgtctgtcaatggagtttatgttatctcaggcgaacaagtttgcgaattatgaggcaatctggtttccgcaaaacatggattggcgtgggcgcgtgtacgctgtcccgatgttcaatcctcagggcaacgatatgacgaaaggcctgctgacctttgcgcaggagaaacccattggtgaagacggcttctattggctcaagattcatggcgcaaatacagctggagtggataaagtaccgtttccacaacgcatcaaatttgttgaggataaccatacgaatattatggaatgcgcgaaagcaccgctggaaaacacttggtgggcggaacaggactcgccgttctgctttctggcgttctgctttgagtatgctggcgtcatcaatagtggtctgtcgtacaactgtagcttgcctctggcatttgatggtagttgctccggcctgcaacatttctcagcgatgttacgcgacgaaattggcggcaaagctgtgaatctcctcccatctgcggaataccaggatatttatcgtatcgtcagcgacaaagttaacgagatgctgaaacaagatctgattaacggtacctctaccaccgtggaaacggtgactgataagaagacaggcgaaattacccaacgcacgaaatacgggaccaaagttatggcacagtggtggttagaacacggtgtgactcgtggcgtcacgaaacgctcggttatgactttggtgtatggggcgctggagtttggattccgcgatcaagtgctgaaggacaccatccagaaagcgatcgataacggcaagggtgacatgtttctgaatccgaatcaggctgctggttacatggcgaaactgatctggaacgcagtgtccgggaccgtagtcgcagcagttgaggcgatgaactggctgaaaagtgcggcgaaattacttgctgctgaagtgaaggatcgtaagacggatacagttctgcgtggccgctgcgcagtacattgggtgactcccgacggcttccctgtgtggcaggaatacaagaagcctattcagacgcgcttgaacctgatgttcctcggtcagttccgcttacagcctaccattaacaccaacaaagatagcgagattgatgcacgcaaacaggcttctggtatcgctcctaactttgtacacagcctggacggtaaccaccttcgtatgactgtagtgtgggcacacgagaagtacggaatcgaatcttttgcactgattcacgactccttcggtaccattccggctgacgctgcgaacctgttcaaagcagtgcgcgaaactttcgttgacacatatgagtcttgtgatgtactggctgatttctacgaccagattgctgaccagttgcacgagtctcaacgcgacaaaatgccagcacttccggctaaaggtaacttgaacctccgtgacatcttaaaatcggacttcgcgttcgcg

SEQ ID NO: 1810 - protein, 890 aa, synthetic construct
  REGION 1..890: note = Variant of RNA polymerase
MHHHHHHMNTINIAKNDFSDIELAAIPFNTLADHYGERLAREQLALEHESYEMGEARFRKMFERQLKAGEVADNAAAKPLITTLLPKMIARINDWFEEVKAKRGKRPTAFQFLQEIKPEAVAYITIKTTLACLTSADNTRVQAVASAIGRAIEDEARFGRIRDLEAKHFKKNVEEQLNKRVGHVYKKAFMQVVEHDMLSKGLLGGGAWSMWHKEDSIHVGVRCIEMLIESTGMVSLHRQNAGVVGQDSERIELAPEYAEAIATRAGALAGISPMFQPCVVPPKPWTGITGGGYWAAGRKPLQLVRTRSLAALRRYEEVSMPEVIKAVNIAQNTAWRINKKVLDVANTITQWKHCPVADIPAMDRGEMPARPLDIDTNEIALKAWKKEASAFYRKDKARVSRRLSMEFMLSQANKFANYEAIWFPQNMDWRGRVYAVPMFNPQGNDMTKGLLTFAQEKPIGEDGFYWLKIHGANTAGVDKVPFPQRIKFVEDNHTNIMECAKAPLENTWWAEQDSPFCFLAFCFEYAGVINSGLSYNCSLPLAFDGSCSGLQHFSAMLRDEIGGKAVNLLPSAEYQDIYRIVSDKVNEMLKQDLINGTSTTVETVTDKKTGEITQRTKYGTKVMAQWWLEHGVTRGVTKRSVMTLVYGALEFGFRDQVLKDTIQKAIDNGKGDMFLNPNQAAGYMAKLIWNAVSGTVVAAVEAMNWLKSAAKLLAAEVKDRKTDTVLRGRCAVHWVTPDGFPVWQEYKKPIQTRLNLMFLGQFRLQPTINTNKDSEIDARKQASGIAPNFVHSLDGNHLRMTVVWAHEKYGIESFALIHDSFGTIPADAANLFKAVRETFVDTYESCDVLADFYDQIADQLHESQRDKMPALPAKGNLNLRDILKSDFAFA

SEQ ID NO: 1811 - DNA, 2670 bp, synthetic construct
  misc_feature 1..2670: note = Variant of RNA polymerase
  source 1..2670: mol_type = other DNA
atgcaccatcaccatcaccatatgaacacgattaacattgctaagaacgacttctctgacatcgaactggctgctatcccgttcaacactctggctgaccattacggtgagcgtttagctcgcgaacagttggcccttgagcatgagtcttacgagatgggtgaagcacgcttccgcaagatgtttgagcgtcaacttaaagctggtgaggttgcggataacgctgccgccaagcctctcatcactaccctactccctaagatgattgcacgcatcaacgactggtttgaggaagtgaaagctaagcgcggcaagcgcccgacagccttccagttcctgcaagaaatcaagccggaagccgtagcgtacatcaccattaagaccactctggcttgcctaaccagtgcggacaatacgcgtgttcaggctgtggcaagcgcaatcggtcgggccattgaggacgaggctcgcttcggtcgtatccgtgaccttgaagctaagcacttcaagaagaacgttgaggaacaactcaacaagcgcgtagggcacgtctacaagaaagcatttatgcaagttgtcgagcacgacatgctctctaagggtctactcggtggcggggcgtggtctagctggcataaggaagactctattcatgtaggagtacgctgcatcgagatgctcattgagtcaaccggaatggttagcttacaccgccaaaatgctggcgtagtaggtcaagactctgagcgtatcgaactcgcacctgaatacgctgaggctatcgcaacccgtgcaggtgcgctggctggcatctctccgatgttccaaccttgcgtagttcctcctaagccgtggactggcattactggtggtggctattgggctgcggggcgcaaacccctgcagttagtacgtactcgcagtctggcggcgcttcgccgctatgaagaagtgtcgatgccggaggtcatcaaagcagtcaacattgcgcagaatacagcatggcgtattaacaagaaagttctcgacgtagcgaataccatcacccaatggaaacactgtccagtcgctgatatccctgcgatggatcgtggcgaaatgccagctcgtccgttggacatcgataccaacgagattgcacttaaagcgtggaagaaagaagcttccgcgttctaccgcaaagacaaagcacgcgttagccgtcgtctgtcaatggagtttatgttatctcaggcgaacaagtttgcgaattatgaggcaatctggtttccgcaaaacatggattggcgtgggcgcgtgtacgctgtcccgatgttcaatcctcagggcaacgatatgacgaaaggcctgctgacctttgcgcaggagaaacccattggtgaagacggcttctattggctcaagattcatggcgcaaatacagctggagtggataaagtaccgtttccacaacgcatcaaatttgttgaggataaccatacgaatattatggaatgcgcgaaagcaccgctggaaaacacttggtgggcggaacaggactcgccgttctgctttctggcgttctgctttgagtatgctggcgtcatcaatagtggtctgtcgtacaactgtagcttgcctctggcatttgatggtagttgctccggcctgcaacatttctcagcgatgttacgcgacgaaattggcggcaaagctgtgaatctcctcccatctgcggaataccaggatatttatcgtatcgtcagcgacaaagttaacgagatgctgaaacaagatctgattaacggtacctctaccaccgtggaaacggtgactgataagaagacaggcgaaattacccaacgcacgaaatacgggaccaaagttatggcacagtggtggttagaacacggtgtgaatcgtggcgtcacgaaacgctcggttatgactttggtgtatggggcgctggagtttggattccgcgatcaagtgctgaaggacaccatcgggaaagcgatcgataacggcaagggtgacatgtttctgaatccgaatcaggctgctggttacatggcgaaactgatctggaacgcagtgtccgggaccgtagtcgcagcagttgaggcgatgaactggctgaaaagtgcggcgaaattacttgctgctgaagtgaaggatcgtaagacggatacagttctgcgtggccgctgcgcagtacattgggtgactcccgacggcttccctgtgtggcaggaatacaagaagcctattcagacgcgcttgaacctgatgttcctcggtcagttccgcttacagcctaccattaacaccaacaaagatagcgagattgatgcacgcaaacagatgtctgctatcgctcctaactttgtacacagcctggacgggaaccaccttcgtatgactgtagtgtgggcacacgagaagtacggaatcgaatcttttgcactgattcacgactccttcggtaccattccggctgacgctgcgaacctgttcaaagcagtgcgcgaaactttcgttgacacatatgagtcttgtgatgtactggctgatttctacgaccggattgctgaccagttgcacgagtctcaacgcgacaaaatgccagcacttccggctaaaggtaacttgaacctccgtgacatcttaaaatcggacttcgcgttcgcg

SEQ ID NO: 1812 - protein, 890 aa, synthetic construct
  REGION 1..890: note = Variant of RNA polymerase
MHHHHHHMNTINIAKNDFSDIELAAIPFNTLADHYGERLAREQLALEHESYEMGEARFRKMFERQLKAGEVADNAAAKPLITTLLPKMIARINDWFEEVKAKRGKRPTAFQFLQEIKPEAVAYITIKTTLACLTSADNTRVQAVASAIGRAIEDEARFGRIRDLEAKHFKKNVEEQLNKRVGHVYKKAFMQVVEHDMLSKGLLGGGAWSSWHKEDSIHVGVRCIEMLIESTGMVSLHRQNAGVVGQDSERIELAPEYAEAIATRAGALAGISPMFQPCVVPPKPWTGITGGGYWAAGRKPLQLVRTRSLAALRRYEEVSMPEVIKAVNIAQNTAWRINKKVLDVANTITQWKHCPVADIPAMDRGEMPARPLDIDTNEIALKAWKKEASAFYRKDKARVSRRLSMEFMLSQANKFANYEAIWFPQNMDWRGRVYAVPMFNPQGNDMTKGLLTFAQEKPIGEDGFYWLKIHGANTAGVDKVPFPQRIKFVEDNHTNIMECAKAPLENTWWAEQDSPFCFLAFCFEYAGVINSGLSYNCSLPLAFDGSCSGLQHFSAMLRDEIGGKAVNLLPSAEYQDIYRIVSDKVNEMLKQDLINGTSTTVETVTDKKTGEITQRTKYGTKVMAQWWLEHGVNRGVTKRSVMTLVYGALEFGFRDQVLKDTIGKAIDNGKGDMFLNPNQAAGYMAKLIWNAVSGTVVAAVEAMNWLKSAAKLLAAEVKDRKTDTVLRGRCAVHWVTPDGFPVWQEYKKPIQTRLNLMFLGQFRLQPTINTNKDSEIDARKQMSAIAPNFVHSLDGNHLRMTVVWAHEKYGIESFALIHDSFGTIPADAANLFKAVRETFVDTYESCDVLADFYDRIADQLHESQRDKMPALPAKGNLNLRDILKSDFAFA

SEQ ID NO: 1813 - DNA, 2670 bp, synthetic construct
  misc_feature 1..2670: note = Variant of RNA polymerase
  source 1..2670: mol_type = other DNA
atgcaccatcaccatcaccatatgaacacgattaacattgctaagaacgacttctctgacatcgaactggctgctatcccgttcaacactctggctgaccattacggtgagcgtttagctcgcgaacagttggcccttgagcatgagtcttacgagatgggtgaagcacgcttccgcaagatgtttgagcgtcaacttaaagctggtgaggttgcggataacgctgccgccaagcctctcatcactaccctactccctaagatgattgcacgcatcaacgactggtttgaggaagtgaaagctaagcgcggcaagcgcccgacagccttccagttcctgcaagaaatcaagccggaagccgtagcgtacatcaccattaagaccactctggcttgcctaaccagtgcggacaatcgtcgtgttcaggctctggcaagcgcaatcggtcgggccattgaggacgaggctcgcttcggtcgtatccgtgaccttgaagctaagcacttcaagaagaacgttgaggaacaactcaacaagcgcgtagggcacgtctacaagaaagcatttatgcaagttgtcgagcacgacatgctctctaagggtctactcggtggcggggcgtggtctatgtggcataaggaagactctattcatgtaggagtacgctgcatcgagatgctcattgagtcaaccggaatggttagcttacaccgccaaaatgctggcgtagtaggtcaagactctgagcgtatcgaactcgcacctgaatacgctgaggctatcgcaacccgtgcaggtgcgctggctggcatctctccgatgttccaaccttgcgtagttcctcctaagccgtggactggcattactggtggtggctattgggctgcggggcgcaaacccctgcagttagtacgtactcgcagtctggcggcgcttcgccgctatgaagaagtgtcgatgccggaggtcatcaaagcagtcaacattgcgcagaatacagcatggcgtattaacaagaaagttctcgacgtagcgaataccatcacccaatggaaacactgtccagtcgctgatatccctgcgatggatcgtggcgaaatgccagctcgtccgttggacatcgataccaacgagattgcacttaaagcgtggaagaaagaagcttccgcgttctaccgcaaagacaaagcacgcgttagccgtcgtctgtcaatggagtttatgttatctcaggcgaacaagtttgcgaattatgaggcaatctggtttccgcaaaacatggattggcgtgggcgcgtgtacgctgtcccgatgttcaatcctcagggcaacgatatgacgaaaggcctgctgacctttgcgcaggagaaacccattggtgaagacggcttctattggctcaagattcatggcgcaaatacagctggagtggataaagtaccgtttccacaacgcatcaaatttgttgaggataaccatacgaatattatggaatgcgcgaaagcaccgctggaaaacacttggtgggcggaacaggactcgccgttctgctttctggcgttctgctttgagtatgctggcgtcatcaatagtggtctgtcgtacaactgtagcttgcctctggcatttgatggtagttgctccggcctgcaacatttctcagcgatgttacgcgacgaaattggcggcaaagctgtgaatctcctcccatctgcggaataccaggatatttatcgtatcgtcagcgacaaagttaacgagatgctgaaacaagatctgattaacggtacctctaccaccgtggaaacggtgactgataagaagacaggcgaaattacccaacgcacgaaatacgggaccaaagttatggcacagtggtggttagaacacggtgtgactcgtggcgtcacgaaacgctcggttatgactttggtgtatggggcgctggagtttggattccgcgatcaagtgctgagtgacaccgtccagaaagcgatcgataacggcaagggtgacatgtttctgaatccgaatcaggctgctggttacatggcgaaactgatctggaacgcagtgtccgggaccgtagtcgcagcagttgaggcgatgaactggctgaaaagtgcggcgaaattacttgctgctgaagtgaaggatcgtaagacggatacagttctgcgtggccgctgcgcagtacattgggtgactcccgacggcttccctgtgtggcaggaatacaagaagcctattcagacgcgcttgaacctgatgttcctcggtcagttccgcttacagcctaccattaacaccaacaaagatagcgagattgatgcacgcaaacagatgtctgctatcgctcctaactttgtacacagcctggacgcgaaccaccttcgtatgactgtagtgtgggcacacgagaagtacggaatcgaatcttttgcactgattcacgactccttcggtaccattccggctgacgctgcgaacctgttcaaagcagtgcgcgaaactttcgttgacacatatgagtcttgtgatgtactggctgatttctacgaccagattgctgaccagttgcacgagtctcaacgcgacaaaatgccagcacttccggctaaaggtaacttgaacctccgtgacatcttaaaatcggacttcgcgttcgcg

SEQ ID NO: 1814 - protein, 890 aa, synthetic construct
  REGION 1..890: note = Variant of RNA polymerase
MHHHHHHMNTINIAKNDFSDIELAAIPFNTLADHYGERLAREQLALEHESYEMGEARFRKMFERQLKAGEVADNAAAKPLITTLLPKMIARINDWFEEVKAKRGKRPTAFQFLQEIKPEAVAYITIKTTLACLTSADNRRVQALASAIGRAIEDEARFGRIRDLEAKHFKKNVEEQLNKRVGHVYKKAFMQVVEHDMLSKGLLGGGAWSMWHKEDSIHVGVRCIEMLIESTGMVSLHRQNAGVVGQDSERIELAPEYAEAIATRAGALAGISPMFQPCVVPPKPWTGITGGGYWAAGRKPLQLVRTRSLAALRRYEEVSMPEVIKAVNIAQNTAWRINKKVLDVANTITQWKHCPVADIPAMDRGEMPARPLDIDTNEIALKAWKKEASAFYRKDKARVSRRLSMEFMLSQANKFANYEAIWFPQNMDWRGRVYAVPMFNPQGNDMTKGLLTFAQEKPIGEDGFYWLKIHGANTAGVDKVPFPQRIKFVEDNHTNIMECAKAPLENTWWAEQDSPFCFLAFCFEYAGVINSGLSYNCSLPLAFDGSCSGLQHFSAMLRDEIGGKAVNLLPSAEYQDIYRIVSDKVNEMLKQDLINGTSTTVETVTDKKTGEITQRTKYGTKVMAQWWLEHGVTRGVTKRSVMTLVYGALEFGFRDQVLSDTVQKAIDNGKGDMFLNPNQAAGYMAKLIWNAVSGTVVAAVEAMNWLKSAAKLLAAEVKDRKTDTVLRGRCAVHWVTPDGFPVWQEYKKPIQTRLNLMFLGQFRLQPTINTNKDSEIDARKQMSAIAPNFVHSLDANHLRMTVVWAHEKYGIESFALIHDSFGTIPADAANLFKAVRETFVDTYESCDVLADFYDQIADQLHESQRDKMPALPAKGNLNLRDILKSDFAFA

SEQ ID NO: 1815 - DNA, 2670 bp, synthetic construct
  misc_feature 1..2670: note = Variant of RNA polymerase
  source 1..2670: mol_type = other DNA
atgcaccatcaccatcaccatatgaacacgattaacattgctaagaacgacttctctgacatcgaactggctgctatcccgttcaacactctggctgaccattacggtgagcgtttagctcgcgaacagttggcccttgagcatgagtcttacgagatgggtgaagcacgcttccgcaagatgtttgagcgtcaacttaaagctggtgaggttgcggataacgctgccgccaagcctctcatcactaccctactccctaagatgattgcacgcatcaacgactggtttgaggaagtgaaagctaagcgcggcaagcgcccgacagccttccagttcctgcaagaaatcaagccggaagccgtagcgtacatcaccattaagaccactctggcttgcctaaccagtgcggacaatgcgactgttcaggctgtggcaagcgcaatcggtcgggccattgaggacgaggctcgcttcggtcgtatccgtgaccttgaagctaagcacttcaagaagaacgttgaggaacaactcaacaagcgcgtagggcacgtctacaagaaagcatttatgcaagttgtcgagcacgacatgctctctaagggtctactcggtggcggggcgtggtctatgtggcataaggaagactctattcatgtaggagtacgctgcatcgagatgctcattgagtcaaccggaatggttagcttacaccgccaaaatgctggcgtagtaggtcaagactctgagcgtatcgaactcgcacctgaatacgctgaggctatcgcaacccgtgcaggtgcgctggctggcatctctccgatgttccaaccttgcgtagttcctcctaagccgtggactggcattactggtggtggctattgggctgcggggcgcaaacccctgcagttagtacgtactcgcagtctggcggcgcttcgccgctatgaagaagtgtcgatgccggaggtcatcaaagcagtcaacattgcgcagaatacagcatggcgtattaacaagaaagttctcgacgtagcgaataccatcacccaatggaaacactgtccagtcgctgatatccctgcgatggatcgtggcgaaatgccagctcgtccgttggacatcgataccaacgagattgcacttaaagcgtggaagaaagaagcttccgcgttctaccgcaaagacaaagcacgcgttagccgtcgtctgtcaatggagtttatgttatctcaggcgaacaagtttgcgaattatgaggcaatctggtttccgcaaaacatggattggcgtgggcgcgtgtacgctgtcccgatgttcaatcctcagggcaacgatatgacgaaaggcctgctgacctttgcgcaggagaaacccattggtgaagacggcttctattggctcaagattcatggcgcaaatacagctggagtggataaagtaccgtttccacaacgcatcaaatttgttgaggataaccatacgaatattatggaatgcgcgaaagcaccgctggaaaacacttggtgggcggaacaggactcgccgttctgctttctggcgttctgctttgagtatgctggcgtcatcaatagtggtctgtcgtacaactgtagcttgcctctggcatttgatggtagttgctccggcctgcaacatttctcagcgatgttacgcgacgaaattggcggcaaagctgtgaatctcctcccatctgcggaataccaggatatttatcgtatcgtcagcgacaaagttaacgagatgctgaaacaagatctgattaacggtacctctaccaccgtggaaacggtgactgataagaagacaggcgaaattacccaacgcacgaaatacgggaccaaagttatggcacagtggtggttagaacacggtgtgactcgtggcgtcacgaaacgctcggttatgactttggtgtatggggcgctggagtttggattccgcgatcaagtgctgaaggacaccgtcgggaaagcgatcgataacggcaagggtgacatgtttctgaatccgaatcaggctgctggttacatggcgaaactgatctggaacgcagtgtccgggaccgtagtcgcagcagttgaggcgatgaactggctgaaaagtgcggcgaaattacttgctgctgaagtgaaggatcgtaagacggatacagttctgcgtggccgctgcgcagtacattgggtgactcccgacggcttccctgtgtggcaggaatacaagaagcctattcagacgcgcttgaacctgatgttcctcggtcagttccgcttacagcctaccattaacaccaacaaagatagcgagattgatgcacgcaaacaggtttctgctatcgctcctaactttgtacacagcctggacggtaaccaccttcgtatgactgtagtgtgggcacacgagaagtacggaatcgaatcttttgcactgattcacgactccttcggtaccattccggctgacgctgcgaacctgttcaaagcagtgcgcgaaactttcgttgacacatatgagtcttgtgatgtactggctgatttctacgaccagattgctgaccagttgcacgagtctcaacgcgacaaaatgccagcacttccggctaaaggtaacttgaacctccgtgacatcttaaaatcggacttcgcgttcgcg

SEQ ID NO: 1816 - protein, 890 aa, synthetic construct
  REGION 1..890: note = Variant of RNA polymerase
MHHHHHHMNTINIAKNDFSDIELAAIPFNTLADHYGERLAREQLALEHESYEMGEARFRKMFERQLKAGEVADNAAAKPLITTLLPKMIARINDWFEEVKAKRGKRPTAFQFLQEIKPEAVAYITIKTTLACLTSADNATVQAVASAIGRAIEDEARFGRIRDLEAKHFKKNVEEQLNKRVGHVYKKAFMQVVEHDMLSKGLLGGGAWSMWHKEDSIHVGVRCIEMLIESTGMVSLHRQNAGVVGQDSERIELAPEYAEAIATRAGALAGISPMFQPCVVPPKPWTGITGGGYWAAGRKPLQLVRTRSLAALRRYEEVSMPEVIKAVNIAQNTAWRINKKVLDVANTITQWKHCPVADIPAMDRGEMPARPLDIDTNEIALKAWKKEASAFYRKDKARVSRRLSMEFMLSQANKFANYEAIWFPQNMDWRGRVYAVPMFNPQGNDMTKGLLTFAQEKPIGEDGFYWLKIHGANTAGVDKVPFPQRIKFVEDNHTNIMECAKAPLENTWWAEQDSPFCFLAFCFEYAGVINSGLSYNCSLPLAFDGSCSGLQHFSAMLRDEIGGKAVNLLPSAEYQDIYRIVSDKVNEMLKQDLINGTSTTVETVTDKKTGEITQRTKYGTKVMAQWWLEHGVTRGVTKRSVMTLVYGALEFGFRDQVLKDTVGKAIDNGKGDMFLNPNQAAGYMAKLIWNAVSGTVVAAVEAMNWLKSAAKLLAAEVKDRKTDTVLRGRCAVHWVTPDGFPVWQEYKKPIQTRLNLMFLGQFRLQPTINTNKDSEIDARKQVSAIAPNFVHSLDGNHLRMTVVWAHEKYGIESFALIHDSFGTIPADAANLFKAVRETFVDTYESCDVLADFYDQIADQLHESQRDKMPALPAKGNLNLRDILKSDFAFA

SEQ ID NO: 1817 - DNA, 2670 bp, synthetic construct
  misc_feature 1..2670: note = Variant of RNA polymerase
  source 1..2670: mol_type = other DNA
atgcaccatcaccatcaccatatgaacacgattaacattgctaagaacgacttctctgacatcgaactggctgctatcccgttcaacactctggctgaccattacggtgagcgtttagctcgcgaacagttggcccttgagcatgagtcttacgagatgggtgaagcacgcttccgcaagatgtttgagcgtcaacttaaagctggtgaggttgcggataacgctgccgccaagcctctcatcactaccctactccctaagatgattgcacgcatcaacgactggtttgaggaagtgaaagctaagcgcggcaagcgcccgacagccttccagttcctgcaagaaatcaagccggaagccgtagcgtacatcaccattaagaccactctggcttgcctaaccagtgcggacaatcgtactgttcaggctgtggcaagcgcaatcggtcgggccattgaggacgaggctcgcttcggtcgtatccgtgaccttgaagctaagcacttcaagaagaacgttgaggaacaactcaacaagcgcgtagggcacgtctacaagaaagcatttatgcaagttgtcgagcacgacatgctctctaagggtctactcggtggcgaggcgtggtcttcgtggcataaggaagactctattcatgtaggagtacgctgcatcgagatgctcattgagtcaaccggaatggttagcttacaccgccaaaatgctggcgtagtaggtcaagactctgagcgtatcgaactcgcacctgaatacgctgaggctatcgcaacccgtgcaggtgcgctggctggcatctctccgatgttccaaccttgcgtagttcctcctaagccgtggactggcattactggtggtggctattgggctgcggggcgcaaacccctgcagttagtacgtactcgcagtctggcggcgcttcgccgctatgaagaagtgtcgatgccggaggtcatcaaagcagtcaacattgcgcagaatacagcatggcgtattaacaagaaagttctcgacgtagcgaataccatcacccaatggaaacactgtccagtcgctgatatccctgcgatggatcgtggcgaaatgccagctcgtccgttggacatcgataccaacgagattgcacttaaagcgtggaagaaagaagcttccgcgttctaccgcaaagacaaagcacgcgttagccgtcgtctgtcaatggagtttatgttatctcaggcgaacaagtttgcgaattatgaggcaatctggtttccgcaaaacatggattggcgtgggcgcgtgtacgctgtcccgatgttcaatcctcagggcaacgatatgacgaaaggcctgctgacctttgcgcaggagaaacccattggtgaagacggcttctattggctcaagattcatggcgcaaatacagctggagtggataaagtaccgtttccacaacgcatcaaatttgttgaggataaccatacgaatattatggaatgcgcgaaagcaccgctggaaaacacttggtgggcggaacaggactcgccgttctgctttctggcgttctgctttgagtatgctggcgtcatcaatagtggtctgtcgtacaactgtagcttgcctctggcatttgatggtagttgctccggcctgcaacatttctcagcgatgttacgcgacgaaattggcggcaaagctgtgaatctcctcccatctgcggaataccaggatatttatcgtatcgtcagcgacaaagttaacgagatgctgaaacaagatctgattaacggtacctctaccaccgtggaaacggtgactgataagaagacaggcgaaattacccaacgcacgaaatacgggaccaaagttatggcacagtggtggttagaacacggtgtgactcgtggcgtcacgaaacgctcggttatgactttggtgtatggggcgctggagtttggattccgcgatcaagtgctgaaggacaccatcgggaaagcgatcgataacggcaagggtgacatgtttctgaatccgaatcaggctgctggttacatggcgaaactgatctggaacgcagtgtccgggaccgtagtcgcagcagttgaggcgatgaactggctgaaaagtgcggcgaaattacttgctgctgaagtgaaggatcgtaagacggatacagttctgcgtggccgctgcgcagtacattgggtgactcccgacggcttccctgtgtggcaggaatacaagaagcctattcagacgcgcttgaacctgatgttcctcggtcagttccgcttacagcctaccattaacaccaacaaagatagcgagattgatgcacgcaaacaggcttctgctatcgctcctaactttgtacacagcctggacgggaaccaccttcgtatgactgtagtgtgggcacacgagaagtacggaatcgaatcttttgcactgattcacgactccttcggtaccattccggctgacgctgcgaacctgttcaaagcagtgcgcgaaactttcgttgacacatatgagtcttgtgatgtactggctgatttctacgaccagattgctgaccagttgcacgagtctcaacgcgacaaaatgccagcacttccggctaaaggtaacttgaacctccgtgacatcttaaaatcggacttcgcgttcgcg

SEQ ID NO: 1818 - protein, 890 aa, synthetic construct
  REGION 1..890: note = Variant of RNA polymerase
MHHHHHHMNTINIAKNDFSDIELAAIPFNTLADHYGERLAREQLALEHESYEMGEARFRKMFERQLKAGEVADNAAAKPLITTLLPKMIARINDWFEEVKAKRGKRPTAFQFLQEIKPEAVAYITIKTTLACLTSADNRTVQAVASAIGRAIEDEARFGRIRDLEAKHFKKNVEEQLNKRVGHVYKKAFMQVVEHDMLSKGLLGGEAWSSWHKEDSIHVGVRCIEMLIESTGMVSLHRQNAGVVGQDSERIELAPEYAEAIATRAGALAGISPMFQPCVVPPKPWTGITGGGYWAAGRKPLQLVRTRSLAALRRYEEVSMPEVIKAVNIAQNTAWRINKKVLDVANTITQWKHCPVADIPAMDRGEMPARPLDIDTNEIALKAWKKEASAFYRKDKARVSRRLSMEFMLSQANKFANYEAIWFPQNMDWRGRVYAVPMFNPQGNDMTKGLLTFAQEKPIGEDGFYWLKIHGANTAGVDKVPFPQRIKFVEDNHTNIMECAKAPLENTWWAEQDSPFCFLAFCFEYAGVINSGLSYNCSLPLAFDGSCSGLQHFSAMLRDEIGGKAVNLLPSAEYQDIYRIVSDKVNEMLKQDLINGTSTTVETVTDKKTGEITQRTKYGTKVMAQWWLEHGVTRGVTKRSVMTLVYGALEFGFRDQVLKDTIGKAIDNGKGDMFLNPNQAAGYMAKLIWNAVSGTVVAAVEAMNWLKSAAKLLAAEVKDRKTDTVLRGRCAVHWVTPDGFPVWQEYKKPIQTRLNLMFLGQFRLQPTINTNKDSEIDARKQASAIAPNFVHSLDGNHLRMTVVWAHEKYGIESFALIHDSFGTIPADAANLFKAVRETFVDTYESCDVLADFYDQIADQLHESQRDKMPALPAKGNLNLRDILKSDFAFA

SEQ ID NO: 1819 - DNA, 2670 bp, synthetic construct
  misc_feature 1..2670: note = Variant of RNA polymerase
  source 1..2670: mol_type = other DNA
atgcaccatcaccatcaccatatgaacacgattaacattgctaagaacgacttctctgacatcgaactggctgctatcccgttcaacactctggctgaccattacggtgagcgtttagctcgcgaacagttggcccttgagcatgagtcttacgagatgggtgaagcacgcttccgcaagatgtttgagcgtcaacttaaagctggtgaggttgcggataacgctgccgccaagcctctcatcactaccctactccctaagatgattgcacgcatcaacgactggtttgaggaagtgaaagctaagcgcggcaagcgcccgacagccttccagttcctgcaagaaatcaagccggaagccgtagcgtacatcaccattaagaccactctggcttgcctaaccagtgcggacaatacgcgtgttcaggctgtggcaagcgcaatcggtcgggccattgaggacgaggctcgcttcggtcgtatccgtgaccttgaagctaagcacttcaagaagaacgttgaggaacaactcaacaagcgcgtagggcacgtctacaagaaagcatttatgcaagttgtcgagcacgacatgctctctaagggtctactcggtggcggggcgtggtctggctggcataaggaagactctattcatgtaggagtacgctgcatcgagatgctcattgagtcaaccggaatggttagcttacaccgccaaaatgctggcgtagtaggtcaagactctgagcgtatcgaactcgcacctgaatacgctgaggctatcgcaacccgtgcaggtgcgctggctggcatctctccgatgttccaaccttgcgtagttcctcctaagccgtggactggcattactggtggtggctattgggctgcggggcgcaaacccctgcagttagtacgtactcgcagtctggcggcgcttcgccgctatgaagaagtgtcgatgccggaggtcatcaaagcagtcaacattgcgcagaatacagcatggcgtattaacaagaaagttctcgacgtagcgaataccatcacccaatggaaacactgtccagtcgctgatatccctgcgatggatcgtggcgaaatgccagctcgtccgttggacatcgataccaacgagattgcacttaaagcgtggaagaaagaagcttccgcgttctaccgcaaagacaaagcacgcgttagccgtcgtctgtcaatggagtttatgttatctcaggcgaacaagtttgcgaattatgaggcaatctggtttccgcaaaacatggattggcgtgggcgcgtgtacgctgtcccgatgttcaatcctcagggcaacgatatgacgaaaggcctgctgacctttgcgcaggagaaacccattggtgaagacggcttctattggctcaagattcatggcgcaaatacagctggagtggataaagtaccgtttccacaacgcatcaaatttgttgaggataaccatacgaatattatggaatgcgcgaaagcaccgctggaaaacacttggtgggcggaacaggactcgccgttctgctttctggcgttctgctttgagtatgctggcgtcatcaatagtggtctgtcgtacaactgtagcttgcctctggcatttgatggtagttgctccggcctgcaacatttctcagcgatgttacgcgacgaaattggcggcaaagctgtgaatctcctcccatctgcggaataccaggatatttatcgtatcgtcagcgacaaagttaacgagatgctgaaacaagatctgattaacggtacctctaccaccgtggaaacggtgactgataagaagacaggcgaaattacccaacgcacgaaatacgggaccaaagttatggcacagtggtggttagaacacggtgtgaatcgtggcgtcacgaaacgctcggttatgactttggtgtatggggcgctggagtttggattccgcgatcaagtgctgagtgacaccatcgggaaagcgatcgataacggcaagggtgacatgtttctgaatccgaatcaggctgctggttacatggcgaaactgatctggaacgcagtgtccgggaccgtagtcgcagcagttgaggcgatgaactggctgaaaagtgcggcgaaattacttgctgctgaagtgaaggatcgtaagacggatacagttctgcgtggccgctgcgcagtacattgggtgactcccgacggcttccctgtgtggcaggaatacaagaagcctattcagacgcgcttgaacctgatgttcctcggtcagttccgcttacagcctaccattaacaccaacaaagatagcgagattgatgcacgcaaacaggtgtctggtatcgctcctaactttgtacacagcctggacgggaaccaccttcgtatgactgtagtgtgggcacacgagaagtacggaatcgaatcttttgcactgattcacgactccttcggtaccattccggctgacgctgcgaacctgttcaaagcagtgcgcgaaactttcgttgacacatatgagtcttgtgatgtactggctgatttctacgaccagattgctgaccagttgcacgagtctcaacgcgacaaaatgccagcacttccggctaaaggtaacttgaacctccgtgacatcttaaaatcggacttcgcgttcgcg

SEQ ID NO: 1820 - protein, 890 aa, synthetic construct
  REGION 1..890: note = Variant of RNA polymerase
MHHHHHHMNTINIAKNDFSDIELAAIPFNTLADHYGERLAREQLALEHESYEMGEARFRKMFERQLKAGEVADNAAAKPLITTLLPKMIARINDWFEEVKAKRGKRPTAFQFLQEIKPEAVAYITIKTTLACLTSADNTRVQAVASAIGRAIEDEARFGRIRDLEAKHFKKNVEEQLNKRVGHVYKKAFMQVVEHDMLSKGLLGGGAWSGWHKEDSIHVGVRCIEMLIESTGMVSLHRQNAGVVGQDSERIELAPEYAEAIATRAGALAGISPMFQPCVVPPKPWTGITGGGYWAAGRKPLQLVRTRSLAALRRYEEVSMPEVIKAVNIAQNTAWRINKKVLDVANTITQWKHCPVADIPAMDRGEMPARPLDIDTNEIALKAWKKEASAFYRKDKARVSRRLSMEFMLSQANKFANYEAIWFPQNMDWRGRVYAVPMFNPQGNDMTKGLLTFAQEKPIGEDGFYWLKIHGANTAGVDKVPFPQRIKFVEDNHTNIMECAKAPLENTWWAEQDSPFCFLAFCFEYAGVINSGLSYNCSLPLAFDGSCSGLQHFSAMLRDEIGGKAVNLLPSAEYQDIYRIVSDKVNEMLKQDLINGTSTTVETVTDKKTGEITQRTKYGTKVMAQWWLEHGVNRGVTKRSVMTLVYGALEFGFRDQVLSDTIGKAIDNGKGDMFLNPNQAAGYMAKLIWNAVSGTVVAAVEAMNWLKSAAKLLAAEVKDRKTDTVLRGRCAVHWVTPDGFPVWQEYKKPIQTRLNLMFLGQFRLQPTINTNKDSEIDARKQVSGIAPNFVHSLDGNHLRMTVVWAHEKYGIESFALIHDSFGTIPADAANLFKAVRETFVDTYESCDVLADFYDQIADQLHESQRDKMPALPAKGNLNLRDILKSDFAFA

SEQ ID NO: 1821 - DNA, 2670 bp, synthetic construct
  misc_feature 1..2670: note = Variant of RNA polymerase
  source 1..2670: mol_type = other DNA
atgcaccatcaccatcaccatatgaacacgattaacattgctaagaacgacttctctgacatcgaactggctgctatcccgttcaacactctggctgaccattacggtgagcgtttagctcgcgaacagttggcccttgagcatgagtcttacgagatgggtgaagcacgcttccgcaagatgtttgagcgtcaacttaaagctggtgaggttgcggataacgctgccgccaagcctctcatcactaccctactccctaagatgattgcacgcatcaacgactggtttgaggaagtgaaagccaagcgcggcaagcgcccgacagccttccagttcctgcaagaaatcaagccggaagccgtagcgtacatcaccattaagaccactctggcttgcctaaccagtgcggacaatacaaccgttcaggctgtagcaagcgcaatcggtcgggccattgaggacgaggctcgcttcggtcgtatccgtgaccttgaagctaagcacttcaagaagaacgttgaggaacaactcaacaagcgcgtagggcacgtctacaagaaagcatttatgcaagttgtcgagcacgacatgctctctaagggtctactcgggggcgtggtatggccgtcgtggcataaggaagactctattcatgtaggagtacgctgcatcgagatgctcattgagtcaaccggaatggttagtttacaccgccaaaatgctggcgtagtaggtcaagactctgagcgtatcgaactcgcacctgaatacgctgaggctatcgcaacccgtgcaggtgcgctggctggcatctctccgatgttccaaccttgcgtagttcctcctaagccgtggactggcattactggtggtggctattgggctgcggggcgcaaacccctgcagttagtacgtactcgcagtctggcggcacttcgccgctatgaagaagtgtcgatgccggaggtcatcaaagcagtcaacattgcgcagaatacagcatggcgtattaacaagaaagttctcgacgtagcgaataccatcacccaatggaaacactgtccagtccgcgatatccctgcgatggatcgtggcgaaatgccagctcgtccgttggacatcgataccaacgagattgcacttaaagcgtggaagaaagaagcttccgcgttctaccgcaaagacaaagcacgcgttagccgtcgtctgtcaatggagtttatgttatctcaggcgaacaagtttgcgaattatgaggcaatctggtttccgtggaacatggattggcgtgggcgcgtgtacgctgtcccgatgttcaatcctcagggcaacgatatgacgaaaggcctgctgacctttgcgcaggagaaacccattggtgaagacggcttctattggctcaagattcatggcgcaaatacagctggagtggataaagtaccgtttccacaacgcatcaaatttgttgaggataaccatacgaatattatggaatgcgcgaaagcaccgctggaaaacacttggtgggcggaacaggactcgccgttctgctttctggcgttctgctttgagtatgctggcgtcatcaatagtggtctgtcgtacaactgtagcttgcctctggcattcgatggtagttgctccggcctgcaacatttctcagcgatgttacgcgacgaaattggcggcaaagctgtgaatctcctcccatctgcggaataccaggatatttatcgtatcgtcagcgacaaagttaacgagatgctgaaacaagatctgattaacggtacctctaccaccgtggaaacggtgactgataagaagacaggcgaaattacccaacgcacgaaatacgggaccaaagttatggcacagtggtggttagaacacggtgtgaatcgtggcgtcacgaaacgctcggttatgactttggtgtatggggcgctggagtttggattccgcgatcaagtgctgagtgacaccattcaaaaagcgatcgataacggcaagggtgacatgtttctgaatccgaatcaggctgctggttacatggcgaaactgatctggaacgcagtgtccgggaccgtagtcgcagcagttgaggcgatgaactggctgaaaagtgcggcgaaattacttgctgctgaagtgaaggatcgtaagacggatacagttctgcgtggccgctgcgcagtacattgggtgactcccgacggcttccctgtgtggcaggaatacaagaagcctattcagacgcgcttgaacctgatgttcctcggtcagttccgcttacagcctaccattaacaccaacaaagatagcgagattgatgtgcgcaaacaggtgtctggtatcgctcctaactttgtacacagcctggacggtaaccaccttcgtatgactgtagtgtgggcacacgagaagtacggaatcgaatcttttgcactgattcacgactccttcggtaccattccggctgacgctgcgaacctgttcaaagcagtgcgcgaaactttcgttgacacatatgagtcttgtgatgtactggctgatttctacgaccagattgctgaccagttgcacgagtctcaacgcgacaaaatgccagcacttccggctaaaggtaacttgaacctccgtgacatcttaaaatcggacttcgcgttcgcg

SEQ ID NO: 1822 - protein, 890 aa, synthetic construct
  REGION 1..890: note = Variant of RNA polymerase
MHHHHHHMNTINIAKNDFSDIELAAIPFNTLADHYGERLAREQLALEHESYEMGEARFRKMFERQLKAGEVADNAAAKPLITTLLPKMIARINDWFEEVKAKRGKRPTAFQFLQEIKPEAVAYITIKTTLACLTSADNTTVQAVASAIGRAIEDEARFGRIRDLEAKHFKKNVEEQLNKRVGHVYKKAFMQVVEHDMLSKGLLGGVVWPSWHKEDSIHVGVRCIEMLIESTGMVSLHRQNAGVVGQDSERIELAPEYAEAIATRAGALAGISPMFQPCVVPPKPWTGITGGGYWAAGRKPLQLVRTRSLAALRRYEEVSMPEVIKAVNIAQNTAWRINKKVLDVANTITQWKHCPVRDIPAMDRGEMPARPLDIDTNEIALKAWKKEASAFYRKDKARVSRRLSMEFMLSQANKFANYEAIWFPWNMDWRGRVYAVPMFNPQGNDMTKGLLTFAQEKPIGEDGFYWLKIHGANTAGVDKVPFPQRIKFVEDNHTNIMECAKAPLENTWWAEQDSPFCFLAFCFEYAGVINSGLSYNCSLPLAFDGSCSGLQHFSAMLRDEIGGKAVNLLPSAEYQDIYRIVSDKVNEMLKQDLINGTSTTVETVTDKKTGEITQRTKYGTKVMAQWWLEHGVNRGVTKRSVMTLVYGALEFGFRDQVLSDTIQKAIDNGKGDMFLNPNQAAGYMAKLIWNAVSGTVVAAVEAMNWLKSAAKLLAAEVKDRKTDTVLRGRCAVHWVTPDGFPVWQEYKKPIQTRLNLMFLGQFRLQPTINTNKDSEIDVRKQVSGIAPNFVHSLDGNHLRMTVVWAHEKYGIESFALIHDSFGTIPADAANLFKAVRETFVDTYESCDVLADFYDQIADQLHESQRDKMPALPAKGNLNLRDILKSDFAFA

SEQ ID NO: 1823 - DNA, 2670 bp, synthetic construct
  misc_feature 1..2670: note = Variant of RNA polymerase
  source 1..2670: mol_type = other DNA
atgcaccatcaccatcaccatatgaacacgattaacattgctaagaacgacttctctgacatcgaactggctgctatcccgttcaacactctggctgaccattacggtgagcgtttagctcgcgaacagttggcccttgagcatgagtcttacgagatgggtgaagcacgcttccgcaagatgtttgagcgtcaacttaaagctggtgaggttgcggataacgctgccgccaagcctctcatcactaccctactccctaagatgattgcacgcatcaacgactggtttgaggaagtgaaagctaagcgcggcaagcgcccgacagccttccagttcctgcaagaaatcaagccggaagccgtagcgtacatcaccattaagaccactctggcttgcctaaccagtgcggacaatcgtcgtgttcaggctctggcaagcgcaatcggtcgggccattgaggacgaggctcgcttcggtcgtatccgtgaccttgaagctaagcacttcaagaagaacgttgaggaacaactcaacaagcgcgtagggcacgtctacaagaaagcatttatgcaagttgtcgagcacgacatgctctctaagggtctactcggtggcgaggcgtggtcttcgtggcataaggaagactctattcatgtaggagtacgctgcatcgagatgctcattgagtcaaccggaatggttagcttacaccgccaaaatgctggcgtagtaggtcaagactctgagcgtatcgaactcgcacctgaatacgctgaggctatcgcaacccgtgcaggtgcgctggctggcatctctccgatgttccaaccttgcgtagttcctcctaagccgtggactggcattactggtggtggctattgggctgcggggcgcaaacccctgcagttagtacgtactcgcagtctggcggcgcttcgccgctatgaagaagtgtcgatgccggaggtcatcaaagcagtcaacattgcgcagaatacagcatggcgtattaacaagaaagttctcgacgtagcgaataccatcacccaatggaaacactgtccagtcgctgatatccctgcgatggatcgtggcgaaatgccagctcgtccgttggacatcgataccaacgagattgcacttaaagcgtggaagaaagaagcttccgcgttctaccgcaaagacaaagcacgcgttagccgtcgtctgtcaatggagtttatgttatctcaggcgaacaagtttgcgaattatgaggcaatctggtttccgcaaaacatggattggcgtgggcgcgtgtacgctgtcccgatgttcaatcctcagggcaacgatatgacgaaaggcctgctgacctttgcgcaggagaaacccattggtgaagacggcttctattggctcaagattcatggcgcaaatacagctggagtggataaagtaccgtttccacaacgcatcaaatttgttgaggataaccatacgaatattatggaatgcgcgaaagcaccgctggaaaacacttggtgggcggaacaggactcgccgttctgctttctggcgttctgctttgagtatgctggcgtcatcaatagtggtctgtcgtacaactgtagcttgcctctggcatttgatggtagttgctccggcctgcaacatttctcagcgatgttacgcgacgaaattggcggcaaagctgtgaatctcctcccatctgcggaataccaggatatttatcgtatcgtcagcgacaaagttaacgagatgctgaaacaagatctgattaacggtacctctaccaccgtggaaacggtgactgataagaagacaggcgaaattacccaacgcacgaaatacgggaccaaagttatggcacagtggtggttagaacacggtgtgaatcgtggcgtcacgaaacgctcggttatgactttggtgtatggggcgctggagtttggattccgcgatcaagtgctgagtgacaccgtccagaaagcgatcgataacggcaagggtgacatgtttctgaatccgaatcaggctgctggttacatggcgaaactgatctggaacgcagtgtccgggaccgtagtcgcagcagttgaggcgatgaactggctgaaaagtgcggcgaaattacttgctgctgaagtgaaggatcgtaagacggatacagttctgcgtggccgctgcgcagtacattgggtgactcccgacggcttccctgtgtggcaggaatacaagaagcctattcagacgcgcttgaacctgatgttcctcggtcagttccgcttacagcctaccattaacaccaacaaagatagcgagattgatgcacgcaaacagatgtctggtatcgctcctaactttgtacacagcctggacggtaaccaccttcgtatgactgtagtgtgggcacacgagaagtacggaatcgaatcttttgcactgattcacgactccttcggtaccattccggctgacgctgcgaacctgttcaaagcagtgcgcgaaactttcgttgacacatatgagtcttgtgatgtactggctgatttctacgaccagattgctgaccagttgcacgagtctcaacgcgacaaaatgccagcacttccggctaaaggtaacttgaacctccgtgacatcttaaaatcggacttcgcgttcgcg

SEQ ID NO: 1824 - protein, 890 aa, synthetic construct
  REGION 1..890: note = Variant of RNA polymerase
MHHHHHHMNTINIAKNDFSDIELAAIPFNTLADHYGERLAREQLALEHESYEMGEARFRKMFERQLKAGEVADNAAAKPLITTLLPKMIARINDWFEEVKAKRGKRPTAFQFLQEIKPEAVAYITIKTTLACLTSADNRRVQALASAIGRAIEDEARFGRIRDLEAKHFKKNVEEQLNKRVGHVYKKAFMQVVEHDMLSKGLLGGEAWSSWHKEDSIHVGVRCIEMLIESTGMVSLHRQNAGVVGQDSERIELAPEYAEAIATRAGALAGISPMFQPCVVPPKPWTGITGGGYWAAGRKPLQLVRTRSLAALRRYEEVSMPEVIKAVNIAQNTAWRINKKVLDVANTITQWKHCPVADIPAMDRGEMPARPLDIDTNEIALKAWKKEASAFYRKDKARVSRRLSMEFMLSQANKFANYEAIWFPQNMDWRGRVYAVPMFNPQGNDMTKGLLTFAQEKPIGEDGFYWLKIHGANTAGVDKVPFPQRIKFVEDNHTNIMECAKAPLENTWWAEQDSPFCFLAFCFEYAGVINSGLSYNCSLPLAFDGSCSGLQHFSAMLRDEIGGKAVNLLPSAEYQDIYRIVSDKVNEMLKQDLINGTSTTVETVTDKKTGEITQRTKYGTKVMAQWWLEHGVNRGVTKRSVMTLVYGALEFGFRDQVLSDTVQKAIDNGKGDMFLNPNQAAGYMAKLIWNAVSGTVVAAVEAMNWLKSAAKLLAAEVKDRKTDTVLRGRCAVHWVTPDGFPVWQEYKKPIQTRLNLMFLGQFRLQPTINTNKDSEIDARKQMSGIAPNFVHSLDGNHLRMTVVWAHEKYGIESFALIHDSFGTIPADAANLFKAVRETFVDTYESCDVLADFYDQIADQLHESQRDKMPALPAKGNLNLRDILKSDFAFA

SEQ ID NO: 1825 - DNA, 2670 bp, synthetic construct
  misc_feature 1..2670: note = Variant of RNA polymerase
  source 1..2670: mol_type = other DNA
atgcaccatcaccatcaccatatgaacacgattaacattgctaagaacgacttctctgacatcgaactggctgctatcccgttcaacactctggctgaccattacggtgagcgtttagctcgcgaacagttggcccttgagcatgagtcttacgagatgggtgaagcacgcttccgcaagatgtttgagcgtcaacttaaagctggtgaggttgcggataacgctgccgccaagcctctcatcactaccctactccctaagatgattgcacgcatcaacgactggtttgaggaagtgaaagccaagcgcggcaagcgcccgacagccttccagttcctgcaagaaatcaagccggaagccgtagcgtacatcaccattaagaccgtgctggctctgctaaccagtgcggacaatacaaccgttcaggctgtagcaagcgcaatcggtaaagccattgaggacgaggctcgcttcggtcgtatccgtgaccttgaagctaagcacttcaagaagaacgttgaggaacaactcaacaagcgcgtagggcacgtctacaagaaagcatttatgcaagttgtcgagcacgacatgctctctaagggtctactcgggggcgtggtatgggaatcgtggcataaggaagactctattcatgtaggagtacgctgcatcgagatgctcattgagtcaaccggaatggttagcttacaccgccaaaatgctggcgtagtaggtcaagactctgagcgtatcgaactcgcacctgaatacgctgaggctatcgcaacccgtgcaggtgcgctggctggcatctctccgatgttccaaccttgcgtagttcctcctaagccgtggactggcattactggtggtggctattgggctgcggggcgcaaacccctgcagttagtacgtactcgcagtctggcggcacttcgccgctatgaagaagtgtcgatgccggaggtcatcaaagcagtcaacattgcgcagaatacagcatggcgtattaacaagaaagttctcgacgtagcgaataccatcacccaatggaaacactgtccagtcgcagatatccctgcgatggatcgtggcgaaatgccagctcgtccgttggacatcgataccaacgagattgcacttaaagcgtggaagaaagaagcttccgcgttctaccgcaaagacaaagcacgcgttagccgtcgtctgtcaatggagtttatgttatctcaggcgaacaagtttgcgaattatgaggcaatctggtttccgtggaacatggattggcgtgggcgcgtgtacgctgtcccgatgttcaatcctcagggcaacgatatgacgaaaggcctgctgacctttgcgcaggagaaacccattggtgaagacggcttctattggctcaagattcatggcgcaaatacagctggagtggataaagtaccgtttccacaacgcatcaaatttgttgaggataaccatacgaatattatggaatgcgcgaaagcaccgctggaaaacacttggtgggcggaacaggactcgccgttctgctttctggcgttctgctttgagtatgctggcgtcatcaatagtggtctgtcgtacaactgtagcttgcctctggcatgggatggtagttgctccggcctgcaacatttctcagcgatgttacgcgacgaaattggcggcaaagctgtgaatctcctcccatctgcggaataccaggatatttatcgtatcgtcagcgacaaagttaacgagatgctgaaacaagatctgattaacggtacctctaccaccgtggaaacggtgactgataagaagacaggcgaaattacccaacgcacgaaatacgggaccaaagttatggcacagtggtggttagaacacggtgtgaatcgtggcgtcacgaaacgctcggttatgactttggtgtatggggcgctggagtttggattccgcgatcaagtgctgagtgacaccattcaaaaagcgatcgataacggcaagggtgacatgtttctgaatccgaatcaggctgctggttacatggcgaaactgatctggaacgcagtgtccgggaccgtagtcgcagcagttgaggcgatgaactggctgaaaagtgcggcgaaattacttgctgctgaagtgaaggatcgtaagacggatacagttctgcgtggccgctgcgcagtacattgggtgactcccgacggcttccctgtgtggcaggaatacaagaagcctattcagacgcgcttgaacctgatgttcctcggtcagttccgcttacagcctaccattaacaccaacaaagatagcgagattgatgcgcgcaaacaggtgtctggtatcgctcctaactttgtacacagcctggacggtaaccaccttcgtatgactgtagtgtgggcacacgagaagtacggaatcgaatcttttgcactgattcacgactccttcggtaccattccggctgacgctgcgaacctgttcaaagcagtgcgcgaaactttcgttgacacatatgagtcttgtgatgtactggctgatttctacgaccagattgctgaccagttgcacgagtctcaacgcgacaaaatgccagcacttccggctaaaggtaacttgaacctccgtgacatcttaaaatcggacttcgcgttcgcg

SEQ ID NO: 1826 - protein, 890 aa, synthetic construct
  REGION 1..890: note = Variant of RNA polymerase
MHHHHHHMNTINIAKNDFSDIELAAIPFNTLADHYGERLAREQLALEHESYEMGEARFRKMFERQLKAGEVADNAAAKPLITTLLPKMIARINDWFEEVKAKRGKRPTAFQFLQEIKPEAVAYITIKTVLALLTSADNTTVQAVASAIGKAIEDEARFGRIRDLEAKHFKKNVEEQLNKRVGHVYKKAFMQVVEHDMLSKGLLGGVVWESWHKEDSIHVGVRCIEMLIESTGMVSLHRQNAGVVGQDSERIELAPEYAEAIATRAGALAGISPMFQPCVVPPKPWTGITGGGYWAAGRKPLQLVRTRSLAALRRYEEVSMPEVIKAVNIAQNTAWRINKKVLDVANTITQWKHCPVADIPAMDRGEMPARPLDIDTNEIALKAWKKEASAFYRKDKARVSRRLSMEFMLSQANKFANYEAIWFPWNMDWRGRVYAVPMFNPQGNDMTKGLLTFAQEKPIGEDGFYWLKIHGANTAGVDKVPFPQRIKFVEDNHTNIMECAKAPLENTWWAEQDSPFCFLAFCFEYAGVINSGLSYNCSLPLAWDGSCSGLQHFSAMLRDEIGGKAVNLLPSAEYQDIYRIVSDKVNEMLKQDLINGTSTTVETVTDKKTGEITQRTKYGTKVMAQWWLEHGVNRGVTKRSVMTLVYGALEFGFRDQVLSDTIQKAIDNGKGDMFLNPNQAAGYMAKLIWNAVSGTVVAAVEAMNWLKSAAKLLAAEVKDRKTDTVLRGRCAVHWVTPDGFPVWQEYKKPIQTRLNLMFLGQFRLQPTINTNKDSEIDARKQVSGIAPNFVHSLDGNHLRMTVVWAHEKYGIESFALIHDSFGTIPADAANLFKAVRETFVDTYESCDVLADFYDQIADQLHESQRDKMPALPAKGNLNLRDILKSDFAFA

SEQ ID NO: 1827 - DNA, 2670 bp, synthetic construct
  misc_feature 1..2670: note = Variant of RNA polymerase
  source 1..2670: mol_type = other DNA
atgcaccatcaccatcaccatatgaacacgattaacattgctaagaacgacttctctgacatcgaactggctgctatcccgttcaacactctggctgaccattacggtgagcgtttagctcgcgaacagttggcccttgagcatgagtcttacgagatgggtgaagcacgcttccgcaagatgtttgagcgtcaacttaaagctggtgaggttgcggataacgctgccgccaagcctctcatcactaccctactccctaagatgattgcacgcatcaacgactggtttgaggaagtgaaagctaagcgcggcaagcgcccgacagccttccagttcctgcaagaaatcaagccggaagccgtagcgtacatcaccattaagaccactctggcttgcctaaccagtgcggacaatgcgagtgttcaggctgtggcaagcgcaatcggtcgggccattgaggacgaggctcgcttcggtcgtatccgtgaccttgaagctaagcacttcaagaagaacgttgaggaacaactcaacaagcgcgtagggcacgtctacaagaaagcatttatgcaagttgtcgagcacgacatgctctctaagggtctactcggtggcggggcgtggtctatgtggcataaggaagactctattcatgtaggagtacgctgcatcgagatgctcattgagtcaaccggaatggttagcttacaccgccaaaatgctggcgtagtaggtcaagactctgagcgtatcgaactcgcacctgaatacgctgaggctatcgcaacccgtgcaggtgcgctggctggcatctctccgatgttccaaccttgcgtagttcctcctaagccgtggactggcattactggtggtggctattgggctgcggggcgcaaacccctgcagttagtacgtactcgcagtctggcggcgcttcgccgctatgaagaagtgtcgatgccggaggtcatcaaagcagtcaacattgcgcagaatacagcatggcgtattaacaagaaagttctcgacgtagcgaataccatcacccaatggaaacactgtccagtcgctgatatccctgcgatggatcgtggcgaaatgccagctcgtccgttggacatcgataccaacgagattgcacttaaagcgtggaagaaagaagcttccgcgttctaccgcaaagacaaagcacgcgttagccgtcgtctgtcaatggagtttatgttatctcaggcgaacaagtttgcgaattatgaggcaatctggtttccgcaaaacatggattggcgtgggcgcgtgtacgctgtcccgatgttcaatcctcagggcaacgatatgacgaaaggcctgctgacctttgcgcaggagaaacccattggtgaagacggcttctattggctcaagattcatggcgcaaatacagctggagtggataaagtaccgtttccacaacgcatcaaatttgttgaggataaccatacgaatattatggaatgcgcgaaagcaccgctggaaaacacttggtgggcggaacaggactcgccgttctgctttctggcgttctgctttgagtatgctggcgtcatcaatagtggtctgtcgtacaactgtagcttgcctctggcatttgatggtagttgctccggcctgcaacatttctcagcgatgttacgcgacgaaattggcggcaaagctgtgaatctcctcccatctgcggaataccaggatatttatcgtatcgtcagcgacaaagttaacgagatgctgaaacaagatctgattaacggtacctctaccaccgtggaaacggtgactgataagaagacaggcgaaattacccaacgcacgaaatacgggaccaaagttatggcacagtggtggttagaacacggtgtgactcgtggcgtcacgaaacgctcggttatgactttggtgtatggggcgctggagtttggattccgcgatcaagtgctgaaggacaccatccagaaagcgatcgataacggcaagggtgacatgtttctgaatccgaatcaggctgctggttacatggcgaaactgatctggaacgcagtgtccgggaccgtagtcgcagcagttgaggcgatgaactggctgaaaagtgcggcgaaattacttgctgctgaagtgaaggatcgtaagacggatacagttctgcgtggccgctgcgcagtacattgggtgactcccgacggcttccctgtgtggcaggaatacaagaagcctattcagacgcgcttgaacctgatgttcctcggtcagttccgcttacagcctaccattaacaccaacaaagatagcgagattgatgcacgcaaacagatgtctggtatcgctcctaactttgtacacagcctggacggtaaccaccttcgtatgactgtagtgtgggcacacgagaagtacggaatcgaatcttttgcactgattcacgactccttcggtaccattccggctgacgctgcgaacctgttcaaagcagtgcgcgaaactttcgttgacacatatgagtcttgtgatgtactggctgatttctacgaccagattgctgaccagttgcacgagtctcaacgcgacaaaatgccagcacttccggctaaaggtaacttgaacctccgtgacatcttaaaatcggacttcgcgttcgcg

SEQ ID NO: 1828 - protein, 890 aa, synthetic construct
  REGION 1..890: note = Variant of RNA polymerase
MHHHHHHMNTINIAKNDFSDIELAAIPFNTLADHYGERLAREQLALEHESYEMGEARFRKMFERQLKAGEVADNAAAKPLITTLLPKMIARINDWFEEVKAKRGKRPTAFQFLQEIKPEAVAYITIKTTLACLTSADNASVQAVASAIGRAIEDEARFGRIRDLEAKHFKKNVEEQLNKRVGHVYKKAFMQVVEHDMLSKGLLGGGAWSMWHKEDSIHVGVRCIEMLIESTGMVSLHRQNAGVVGQDSERIELAPEYAEAIATRAGALAGISPMFQPCVVPPKPWTGITGGGYWAAGRKPLQLVRTRSLAALRRYEEVSMPEVIKAVNIAQNTAWRINKKVLDVANTITQWKHCPVADIPAMDRGEMPARPLDIDTNEIALKAWKKEASAFYRKDKARVSRRLSMEFMLSQANKFANYEAIWFPQNMDWRGRVYAVPMFNPQGNDMTKGLLTFAQEKPIGEDGFYWLKIHGANTAGVDKVPFPQRIKFVEDNHTNIMECAKAPLENTWWAEQDSPFCFLAFCFEYAGVINSGLSYNCSLPLAFDGSCSGLQHFSAMLRDEIGGKAVNLLPSAEYQDIYRIVSDKVNEMLKQDLINGTSTTVETVTDKKTGEITQRTKYGTKVMAQWWLEHGVTRGVTKRSVMTLVYGALEFGFRDQVLKDTIQKAIDNGKGDMFLNPNQAAGYMAKLIWNAVSGTVVAAVEAMNWLKSAAKLLAAEVKDRKTDTVLRGRCAVHWVTPDGFPVWQEYKKPIQTRLNLMFLGQFRLQPTINTNKDSEIDARKQMSGIAPNFVHSLDGNHLRMTVVWAHEKYGIESFALIHDSFGTIPADAANLFKAVRETFVDTYESCDVLADFYDQIADQLHESQRDKMPALPAKGNLNLRDILKSDFAFA

SEQ ID NO: 1829 - DNA, 2670 bp, synthetic construct
  misc_feature 1..2670: note = Variant of RNA polymerase
  source 1..2670: mol_type = other DNA
atgcaccatcaccatcaccatatgaacacgattaacattgctaagaacgacttctctgacatcgaactggctgctatcccgttcaacactctggctgaccattacggtgagcgtttagctcgcgaacagttggcccttgagcatgagtcttacgagatgggtgaagcacgcttccgcaagatgtttgagcgtcaacttaaagctggtgaggttgcggataacgctgccgccaagcctctcatcactaccctactccctaagatgattgcacgcatcaacgactggtttgaggaagtgaaacgcaagcgcggcaagcgcccgacagccttccagttcctgcaagaaatcaagccggaagccgtagcgtacatcaccattaagaccactctggctctgctaaccagtgcggacaatacaaccgttcaggctgtagcaagcgcaatcggtaaagccattgaggacgaggctcgcttcggtcgtatccgtgaccttgaagctaagcacttcaagaagaacgttgaggaacaactcaacaagcgcgtagggcacgtctacaagaaagcatttatgcaagttgtcgagcacgacatgctctctaagggtctactcgggggcggggcatgggaatcgtggcataaggaagactctattcatgtaggagtacgctgcatcgagatgctcattgagtcaaccggaatggttagtttacaccgccaaaatgctggcgtagtaggtcaagactctgagcgtatcgaactcgcacctgaatacgctgaggctatcgcaacccgtgcaggtgcgctggctggcatctctccgatgttccaaccttgcgtagttcctcctaagccgtggactggcattactggtggtggctattgggctgcggggcgcaaacccctgcagttagtacgtactcgcagtctggcggcgcttcgccgctatgaagaagtgtcgatgccggaggtcatcaaagcagtcaacattgcgcagaatacagcatggcgtattaacaagaaagttctcgacgtagcgaataccatcacccaatggaaacactgtccagtccgcgatatccctgcgatggatcgtggcgaaatgccagctcgtccgttggacatcgataccaacgagattgcacttaaagcgtggaagaaagaagcttccgcgttctaccgcaaagacaaagcacgcgttagccgtcgtctgtcaatggagtttatgttatctcaggcgaacaagtttgcgaattatgaggcaatctggtttccgtggaacatggattggcgtgggcgcgtgtacgctgtcccgatgttcaatcctcagggcaacgatatgacgaaaggcctgctgacctttgcgcaggagaaacccattggtgaagacggcttctattggctcaagattcatggcgcaaatacagctggagtggataaagtaccgtttccacaacgcatcaaatttgttgaggataaccatacgaatattatggaatgcgcgaaagcaccgctggaaaacacttggtgggcggaacaggactcgccgttctgctttctggcgttctgctttgagtatgctggcgtcatcaatagtggtctgtcgtacaactgtagcttgcctatggcattcgatggtagttgctccggcctgcaacatttctcagcgatgttacgcgacgaaattggcggcaaagctgtgaatctcctcccatctgcggaataccaggatatttatcgtatcgtcagcgacaaagttaacgagatgctgaaacaagatctgattaacggtacctctaccaccgtggaaacggtgactgataagaagacaggcgaaattacccaacgcacgaaatacgggaccaaagttatggcacagtggtggttagaacacggtgtgaatcgtggcgtcacgaaacgctcggttatgactttggtgtatggggcgctggagtttggattccgcgatcaagtgctgagtgacaccattcaaaaagcgatcgataacggcaagggtgacatgtttctgaatccgaatcaggctgctggttacatggcgaaactgatctggaacgcagtgtccgggaccgtagtcgcagcagttgaggcgatgaactggctgaaaagtgcggcgaaattacttgctgctgaagtgaaggatcgtaagacggatacagttctgcgtggccgctgcgcagtacattgggtgactcccgacggcttccctgtgtggcaggaatacaagaagcctattcagacgcgcttgaacctgatgttcctcggtcagttccgcttacagcctaccattaacaccaacaaagatagcgagattgatgcgcgcaaacaggtgtctggtatcgctcctaactttgtacacagcctggacggtaaccaccttcgtatgactgtagtgtgggcacacgagaagtacggaatcgaatcttttgcactgattcacgactccttcggtaccattccggctgacgctgcgaacctgttcaaagcagtgcgcgaaactttcgttgacacatatgagtcttgtgatgtactggctgatttctacgaccagattgctgaccagttgcacgagtctcaacgcgacaaaatgccagcacttccggctaaaggtaacttgaacctccgtgacatcttaaaatcggacttcgcgttcgcg

SEQ ID NO: 1830 - protein, 890 aa, synthetic construct
  REGION 1..890: note = Variant of RNA polymerase
MHHHHHHMNTINIAKNDFSDIELAAIPFNTLADHYGERLAREQLALEHESYEMGEARFRKMFERQLKAGEVADNAAAKPLITTLLPKMIARINDWFEEVKRKRGKRPTAFQFLQEIKPEAVAYITIKTTLALLTSADNTTVQAVASAIGKAIEDEARFGRIRDLEAKHFKKNVEEQLNKRVGHVYKKAFMQVVEHDMLSKGLLGGGAWESWHKEDSIHVGVRCIEMLIESTGMVSLHRQNAGVVGQDSERIELAPEYAEAIATRAGALAGISPMFQPCVVPPKPWTGITGGGYWAAGRKPLQLVRTRSLAALRRYEEVSMPEVIKAVNIAQNTAWRINKKVLDVANTITQWKHCPVRDIPAMDRGEMPARPLDIDTNEIALKAWKKEASAFYRKDKARVSRRLSMEFMLSQANKFANYEAIWFPWNMDWRGRVYAVPMFNPQGNDMTKGLLTFAQEKPIGEDGFYWLKIHGANTAGVDKVPFPQRIKFVEDNHTNIMECAKAPLENTWWAEQDSPFCFLAFCFEYAGVINSGLSYNCSLPMAFDGSCSGLQHFSAMLRDEIGGKAVNLLPSAEYQDIYRIVSDKVNEMLKQDLINGTSTTVETVTDKKTGEITQRTKYGTKVMAQWWLEHGVNRGVTKRSVMTLVYGALEFGFRDQVLSDTIQKAIDNGKGDMFLNPNQAAGYMAKLIWNAVSGTVVAAVEAMNWLKSAAKLLAAEVKDRKTDTVLRGRCAVHWVTPDGFPVWQEYKKPIQTRLNLMFLGQFRLQPTINTNKDSEIDARKQVSGIAPNFVHSLDGNHLRMTVVWAHEKYGIESFALIHDSFGTIPADAANLFKAVRETFVDTYESCDVLADFYDQIADQLHESQRDKMPALPAKGNLNLRDILKSDFAFA

SEQ ID NO: 1831 - DNA, 2670 bp, synthetic construct
  misc_feature 1..2670: note = Variant of RNA polymerase
  source 1..2670: mol_type = other DNA
atgcaccatcaccatcaccatatgaacacgattaacattgctaagaacgacttctctgacatcgaactggctgctatcccgttcaacactctggctgaccattacggtgagcgtttagctcgcgaacagttggcccttgagcatgagtcttacgagatgggtgaagcacgcttccgcaagatgtttgagcgtcaacttaaagctggtgaggttgcggataacgctgccgccaagcctctcatcactaccctactccctaagatgattgcacgcatcaacgactggtttgaggaagtgaaagctaagcgcggcaagcgcccgacagccttccagttcctgcaagaaatcaagccggaagccgtagcgtacatcaccattaagaccactctggcttgcctaaccagtgcggacaatgcgactgttcaggctgtggcaagcgcaatcggtcgggccattgaggacgaggctcgcttcggtcgtatccgtgaccttgaagctaagcacttcaagaagaacgttgaggaacaactcaacaagcgcgtagggcacgtctacaagaaagcatttatgcaagttgtcgagcacgacatgctctctaagggtctactcggtggcggggcgtggtctatgtggcataaggaagactctattcatgtaggagtacgctgcatcgagatgctcattgagtcaaccggaatggttagcttacaccgccaaaatgctggcgtagtaggtcaagactctgagcgtatcgaactcgcacctgaatacgctgaggctatcgcaacccgtgcaggtgcgctggctggcatctctccgatgttccaaccttgcgtagttcctcctaagccgtggactggcattactggtggtggctattgggctgcggggcgcaaacccctgcagttagtacgtactcgcagtctggcggcgcttcgccgctatgaagaagtgtcgatgccggaggtcatcaaagcagtcaacattgcgcagaatacagcatggcgtattaacaagaaagttctcgacgtagcgaataccatcacccaatggaaacactgtccagtcgctgatatccctgcgatggatcgtggcgaaatgccagctcgtccgttggacatcgataccaacgagattgcacttaaagcgtggaagaaagaagcttccgcgttctaccgcaaagacaaagcacgcgttagccgtcgtctgtcaatggagtttatgttatctcaggcgaacaagtttgcgaattatgaggcaatctggtttccgcaaaacatggattggcgtgggcgcgtgtacgctgtcccgatgttcaatcctcagggcaacgatatgacgaaaggcctgctgacctttgcgcaggagaaacccattggtgaagacggcttctattggctcaagattcatggcgcaaatacagctggagtggataaagtaccgtttccacaacgcatcaaatttgttgaggataaccatacgaatattatggaatgcgcgaaagcaccgctggaaaacacttggtgggcggaacaggactcgccgttctgctttctggcgttctgctttgagtatgctggcgtcatcaatagtggtctgtcgtacaactgtagcttgcctctggcatttgatggtagttgctccggcctgcaacatttctcagcgatgttacgcgacgaaattggcggcaaagctgtgaatctcctcccatctgcggaataccaggatatttatcgtatcgtcagcgacaaagttaacgagatgctgaaacaagatctgattaacggtacctctaccaccgtggaaacggtgactgataagaagacaggcgaaattacccaacgcacgaaatacgggaccaaagttatggcacagtggtggttagaacacggtgtgaatcgtggcgtcacgaaacgctcggttatgactttggtgtatggggcgctggagtttggattccgcgatcaagtgctgagtgacaccgtccagaaagcgatcgataacggcaagggtgacatgtttctgaatccgaatcaggctgctggttacatggcgaaactgatctggaacgcagtgtccgggaccgtagtcgcagcagttgaggcgatgaactggctgaaaagtgcggcgaaattacttgctgctgaagtgaaggatcgtaagacggatacagttctgcgtggccgctgcgcagtacattgggtgactcccgacggcttccctgtgtggcaggaatacaagaagcctattcagacgcgcttgaacctgatgttcctcggtcagttccgcttacagcctaccattaacaccaacaaagatagcgagattgatgcacgcaaacaggtttctggtatcgctcctaactttgtacacagcctggacggtaaccaccttcgtatgactgtagtgtgggcacacgagaagtacggaatcgaatcttttgcactgattcacgactccttcggtaccattccggctgacgctgcgaacctgttcaaagcagtgcgcgaaactttcgttgacacatatgagtcttgtgatgtactggctgatttctacgaccagattgctgaccagttgcacgagtctcaacgcgacaaaatgccagcacttccggctaaaggtaacttgaacctccgtgacatcttaaaatcggacttcgcgttcgcg

SEQ ID NO: 1832 - protein, 890 aa, synthetic construct
  REGION 1..890: note = Variant of RNA polymerase
MHHHHHHMNTINIAKNDFSDIELAAIPFNTLADHYGERLAREQLALEHESYEMGEARFRKMFERQLKAGEVADNAAAKPLITTLLPKMIARINDWFEEVKAKRGKRPTAFQFLQEIKPEAVAYITIKTTLACLTSADNATVQAVASAIGRAIEDEARFGRIRDLEAKHFKKNVEEQLNKRVGHVYKKAFMQVVEHDMLSKGLLGGGAWSMWHKEDSIHVGVRCIEMLIESTGMVSLHRQNAGVVGQDSERIELAPEYAEAIATRAGALAGISPMFQPCVVPPKPWTGITGGGYWAAGRKPLQLVRTRSLAALRRYEEVSMPEVIKAVNIAQNTAWRINKKVLDVANTITQWKHCPVADIPAMDRGEMPARPLDIDTNEIALKAWKKEASAFYRKDKARVSRRLSMEFMLSQANKFANYEAIWFPQNMDWRGRVYAVPMFNPQGNDMTKGLLTFAQEKPIGEDGFYWLKIHGANTAGVDKVPFPQRIKFVEDNHTNIMECAKAPLENTWWAEQDSPFCFLAFCFEYAGVINSGLSYNCSLPLAFDGSCSGLQHFSAMLRDEIGGKAVNLLPSAEYQDIYRIVSDKVNEMLKQDLINGTSTTVETVTDKKTGEITQRTKYGTKVMAQWWLEHGVNRGVTKRSVMTLVYGALEFGFRDQVLSDTVQKAIDNGKGDMFLNPNQAAGYMAKLIWNAVSGTVVAAVEAMNWLKSAAKLLAAEVKDRKTDTVLRGRCAVHWVTPDGFPVWQEYKKPIQTRLNLMFLGQFRLQPTINTNKDSEIDARKQVSGIAPNFVHSLDGNHLRMTVVWAHEKYGIESFALIHDSFGTIPADAANLFKAVRETFVDTYESCDVLADFYDQIADQLHESQRDKMPALPAKGNLNLRDILKSDFAFA

SEQ ID NO: 1833 - DNA, 2670 bp, synthetic construct
  misc_feature 1..2670: note = Variant of RNA polymerase
  source 1..2670: mol_type = other DNA
atgcaccatcaccatcaccatatgaacacgattaacattgctaagaacgacttctctgacatcgaactggctgctatcccgttcaacactctggctgaccattacggtgagcgtttagctcgcgaacagttggcccttgagcatgagtcttacgagatgggtgaagcacgcttccgcaagatgtttgagcgtcaacttaaagctggtgaggttgcggataacgctgccgccaagcctctcatcactaccctactccctaagatgattgcacgcatcaacgactggtttgaggaagtgaaagccaagcgcggcaagcgcccgacagccttccagttcctgcaagaaatcaagccggaagccgtagcgtacatcaccattaagaccactctggcttgcctaaccagtgcggacaatacaaccgttcaggctgtagcaagcgcaatcggtcgcgccattgaggacgaggctcgcttcggtcgtatccgtgaccttgaagctaagcacttcaagaagaacgttgaggaacaactcaacaagcgcgtagggcacgtctacaagaaagcatttatgcaagttgtcgagcacgacatgctctctaagggtctactcgggggcgaggtatggccgtcgtggcataaggaagactctattcatgtaggagtacgctgcatcgagatgctcattgagtcaaccggaatggttagtttacaccgccaaaatgctggcgtagtaggtcaagactctgagcgtatcgaactcgcacctgaatacgctgaggctatcgcaacccgtgcaggtgcgctggctggcatctctccgatgttccaaccttgcgtagttcctcctaagccgtggactggcattactggtggtggctattgggctgcggggcgcaaacccctgcagttagtacgtactcgcagtctggcggcgcttcgccgctatgaagaagtgtcgatgccggaggtcatcaaagcagtcaacattgcgcagaatacagcatggcgtattaacaagaaagttctcgacgtagcgaataccatcacccaatggaaacactgtccagtccgcgatatccctgcgatggatcgtggcgaaatgccagctcgtccgttggacatcgataccaacgagattgcacttaaagcgtggaagaaagaagcttccgcgttctaccgcaaagacaaagcacgcgttagccgtcgtctgtcaatggagtttatgttatctcaggcgaacaagtttgcgaattatgaggcaatctggtttccgtggaacatggattggcgtgggcgcgtgtacgctgtcccgatgttcaatcctcagggcaacgatatgacgaaaggcctgctgacctttgcgcaggagaaacccattggtgaagacggcttctattggctcaagattcatggcgcaaatacagctggagtggataaagtaccgtttccacaacgcatcaaatttgttgaggataaccatacgaatattatggaatgcgcgaaagcaccgctggaaaacacttggtgggcggaacaggactcgccgttctgctttctggcgttctgctttgagtatgctggcgtcatcaatagtggtctgtcgtacaactgtagcttgcctctggcattcgatggtagttgctccggcctgcaacatttctcagcgatgttacgcgacgaaattggcggcaaagctgtgaatctcctcccatctgcggaataccaggatatttatcgtatcgtcagcgacaaagttaacgagatgctgaaacaagatctgattaacggtacctctaccaccgtggaaacggtgactgataagaagacaggcgaaattacccaacgcacgaaatacgggaccaaagttatggcacagtggtggttagaacacggtgtgaatcgtggcgtcacgaaacgctcggttatgactttggtgtatggggcgctggagtttggattccgcgatcaagtgctgagtgacaccattcaaaaagcgatcgataacggcaagggtgacatgtttctgaatccgaatcaggctgctggttacatggcgaaactgatctggaacgcagtgtccgggaccgtagtcgcagcagttgaggcgatgaactggctgaaaagtgcggcgaaattacttgctgctgaagtgaaggatcgtaagacggatacagttctgcgtggccgctgcgcagtacattgggtgactcccgacggcttccctgtgtggcaggaatacaagaagcctattcagacgcgcttgaacctgatgttcctcggtcagttccgcttacagcctaccattaacaccaacaaagatagcgagattgatgtgcgcaaacaggtgtctggtatcgctcctaactttgtacacagcctggacggtaaccaccttcgtatgactgtagtgtgggcacacgagaagtacggaatcgaatcttttgcactgattcacgactccttcggtaccattccggctgacgctgcgaacctgttcaaagcagtgcgcgaaactttcgttgacacatatgagtcttgtgatgtactggctgatttctacgaccagattgctgaccagttgcacgagtctcaacgcgacaaaatgccagcacttccggctaaaggtaacttgaacctccgtgacatcttaaaatcggacttcgcgttcgcg

SEQ ID NO: 1834 - protein, 890 aa, synthetic construct
  REGION 1..890: note = Variant of RNA polymerase
MHHHHHHMNTINIAKNDFSDIELAAIPFNTLADHYGERLAREQLALEHESYEMGEARFRKMFERQLKAGEVADNAAAKPLITTLLPKMIARINDWFEEVKAKRGKRPTAFQFLQEIKPEAVAYITIKTTLACLTSADNTTVQAVASAIGRAIEDEARFGRIRDLEAKHFKKNVEEQLNKRVGHVYKKAFMQVVEHDMLSKGLLGGEVWPSWHKEDSIHVGVRCIEMLIESTGMVSLHRQNAGVVGQDSERIELAPEYAEAIATRAGALAGISPMFQPCVVPPKPWTGITGGGYWAAGRKPLQLVRTRSLAALRRYEEVSMPEVIKAVNIAQNTAWRINKKVLDVANTITQWKHCPVRDIPAMDRGEMPARPLDIDTNEIALKAWKKEASAFYRKDKARVSRRLSMEFMLSQANKFANYEAIWFPWNMDWRGRVYAVPMFNPQGNDMTKGLLTFAQEKPIGEDGFYWLKIHGANTAGVDKVPFPQRIKFVEDNHTNIMECAKAPLENTWWAEQDSPFCFLAFCFEYAGVINSGLSYNCSLPLAFDGSCSGLQHFSAMLRDEIGGKAVNLLPSAEYQDIYRIVSDKVNEMLKQDLINGTSTTVETVTDKKTGEITQRTKYGTKVMAQWWLEHGVNRGVTKRSVMTLVYGALEFGFRDQVLSDTIQKAIDNGKGDMFLNPNQAAGYMAKLIWNAVSGTVVAAVEAMNWLKSAAKLLAAEVKDRKTDTVLRGRCAVHWVTPDGFPVWQEYKKPIQTRLNLMFLGQFRLQPTINTNKDSEIDVRKQVSGIAPNFVHSLDGNHLRMTVVWAHEKYGIESFALIHDSFGTIPADAANLFKAVRETFVDTYESCDVLADFYDQIADQLHESQRDKMPALPAKGNLNLRDILKSDFAFA

SEQ ID NO: 1835 - DNA, 2670 bp, synthetic construct
  misc_feature 1..2670: note = Variant of RNA polymerase
  source 1..2670: mol_type = other DNA
atgcaccatcaccatcaccatatgaacacgattaacattgctaagaacgacttctctgacatcgaactggctgctatcccgttcaacactctggctgaccattacggtgagcgtttagctcgcgaacagttggcccttgagcatgagtcttacgagatgggtgaagcacgcttccgcaagatgtttgagcgtcaacttaaagctggtgaggttgcggataacgctgccgccaagcctctcatcactaccctactccctaagatgattgcacgcatcaacgactggtttgaggaagtgaaagccaagcgcggcaagcgcccgacagccttccagttcctgcaagaaatcaagccggaagccgtagcgtacatcaccattaagaccactctggctgtcctaaccagtgcggacaatacaaccgttcaggctgtagcaagcgcaatcggtcgggccattgaggacgaggctcgcttcggtcgtatccgtgaccttgaagctaagcacttcaagaagaacgttgaggaacaactcaacaagcgcgtagggcacgtctacaagaaagcatttatgcaagttgtcgagcacgacatgctctctaagggtctactcggtggcgaggcgtggtcgtcgtggcataaggaagactctattcatgtaggagtacgctgcatcgagatgctcattgagtcaaccggaatggttagcttacaccgccaaaatgctggcgtagtaggtcaagactctgagcgtatcgaactcgcacctgaatacgctgaggctatcgcaacccgtgcaggtgcgctggctggcatctctccgatgttccaaccttgcgtagttcctcctaagccgtggactggcattactggtggtggctattgggctgcggggcgcaaacccctgcagttagtacgtactcgcagtctggcggcacttcgccgctatgaagaagtgtcgatgccggaggtcatcaaagcagtcaacattgcgcagaatacagcatggcgtattaacaagaaagttctcgacgtagcgaataccatcacccaatggaaacactgtccagtcgctgatatccctgcgatggatcgtggcgaaatgccagctcgtccgttggacatcgataccaacgagattgcacttaaagcgtggaagaaagaagcttccgcgttctaccgcaaagacaaagcacgcgttagccgtcgtctgtcaatggagtttatgttatctcaggcgaacaagtttgcgaattatgaggcaatctggtttccgtggaacatggattggcgtgggcgcgtgtacgctgtcccgatgttcaatcctcagggcaacgatatgacgaaaggcctgctgacctttgcgcaggagaaacccattggtgaagacggcttctattggctcaagattcatggcgcaaatacagctggagtggataaagtaccgtttccacaacgcatcaaatttgttgaggataaccatacgaatattatggaatgcgcgaaagcaccgctggaaaacacttggtgggcggaacaggactcgccgttctgctttctggcgttctgctttgagtatgctggcgtcatcaatagtggtctgtcgtacaactgtagcttgcctatggcattcgatggtagttgctccggcctgcaacatttctcagcgatgttacgcgacgaaattggcggcaaagctgtgaatctcctcccatctgcggaataccaggatatttatcgtatcgtcagcgacaaagttaacgagatgctgaaacaagatctgattaacggtacctctaccaccgtggaaacggtgactgataagaagacaggcgaaattacccaacgcacgaaatacgggaccaaagttatggcacagtggtggttagaacacggtgtgaatcgtggcgtcacgaaacgctcggttatgactttggtgtatggggcgctggagtttggattccgcgatcaagtgctgagtgacaccattcaaaaagcgatcgataacggcaagggtgacatgtttctgaatccgaatcaggctgctggttacatggcgaaactgatctggaacgcagtgtccgggaccgtagtcgcagcagttgaggcgatgaactggctgaaaagtgcggcgaaattacttgctgctgaagtgaaggatcgtaagacggatacagttctgcgtggccgctgcgcagtacattgggtgactcccgacggcttccctgtgtggcaggaatacaagaagcctattcagacgcgcttgaacctgatgttcctcggtcagttccgcttacagcctaccattaacaccaacaaagatagcgagattgatgtgcgcaaacaggtgtctggtatcgctcctaactttgtacacagcctggacggtaaccaccttcgtatgactgtagtgtgggcacacgagaagtacggaatcgaatcttttgcactgattcacgactccttcggtaccattccggctgacgctgcgaacctgttcaaagcagtgcgcgaaactttcgttgacacatatgagtcttgtgatgtactggctgatttctacgaccagattgctgaccagttgcacgagtctcaacgcgacaaaatgccagcacttccggctaaaggtaacttgaacctccgtgacatcttaaaatcggacttcgcgttcgcg

SEQ ID NO: 1836 - protein, 890 aa, synthetic construct
  REGION 1..890: note = Variant of RNA polymerase
MHHHHHHMNTINIAKNDFSDIELAAIPFNTLADHYGERLAREQLALEHESYEMGEARFRKMFERQLKAGEVADNAAAKPLITTLLPKMIARINDWFEEVKAKRGKRPTAFQFLQEIKPEAVAYITIKTTLAVLTSADNTTVQAVASAIGRAIEDEARFGRIRDLEAKHFKKNVEEQLNKRVGHVYKKAFMQVVEHDMLSKGLLGGEAWSSWHKEDSIHVGVRCIEMLIESTGMVSLHRQNAGVVGQDSERIELAPEYAEAIATRAGALAGISPMFQPCVVPPKPWTGITGGGYWAAGRKPLQLVRTRSLAALRRYEEVSMPEVIKAVNIAQNTAWRINKKVLDVANTITQWKHCPVADIPAMDRGEMPARPLDIDTNEIALKAWKKEASAFYRKDKARVSRRLSMEFMLSQANKFANYEAIWFPWNMDWRGRVYAVPMFNPQGNDMTKGLLTFAQEKPIGEDGFYWLKIHGANTAGVDKVPFPQRIKFVEDNHTNIMECAKAPLENTWWAEQDSPFCFLAFCFEYAGVINSGLSYNCSLPMAFDGSCSGLQHFSAMLRDEIGGKAVNLLPSAEYQDIYRIVSDKVNEMLKQDLINGTSTTVETVTDKKTGEITQRTKYGTKVMAQWWLEHGVNRGVTKRSVMTLVYGALEFGFRDQVLSDTIQKAIDNGKGDMFLNPNQAAGYMAKLIWNAVSGTVVAAVEAMNWLKSAAKLLAAEVKDRKTDTVLRGRCAVHWVTPDGFPVWQEYKKPIQTRLNLMFLGQFRLQPTINTNKDSEIDVRKQVSGIAPNFVHSLDGNHLRMTVVWAHEKYGIESFALIHDSFGTIPADAANLFKAVRETFVDTYESCDVLADFYDQIADQLHESQRDKMPALPAKGNLNLRDILKSDFAFA

SEQ ID NO: 1837 - DNA, 2670 bp, synthetic construct
  misc_feature 1..2670: note = Variant of RNA polymerase
  source 1..2670: mol_type = other DNA
atgcaccatcaccatcaccatatgaacacgattaacattgctaagaacgacttctctgacatcgaactggctgctatcccgttcaacactctggctgaccattacggtgagcgtttagctcgcgaacagttggcccttgagcatgagtcttacgagatgggtgaagcacgcttccgcaagatgtttgagcgtcaacttaaagctggtgaggttgcggataacgctgccgccaagcctctcatcactaccctactccctaagatgattgcacgcatcaacgactggtttgaggaagtgaaagccaagcgcggcaagcgcccgacagccttccagttcctgcaagaaatcaagccggaagccgtagcgtacatcaccattaagaccactctggcttgcctaaccagtgcggacaatacaaccgttcaggctgtagcaagcgcaatcggtaaagccattgaggacgaggctcgcttcggtcgtatccgtgaccttgaagctaagcacttcaagaagaacgttgaggaacaactcaacaagcgcgtagggcacgtctacaagaaagcatttatgcaagttgtcgagcacgacatgctctctaagggtctactcgggggcgtggtatggtcgtcgtggcataaggaagactctattcatgtaggagtacgctgcatcgagatgctcattgagtcaaccggaatggttagcttacaccgccaaaatgctggcgtagtaggtcaagactctgagcgtatcgaactcgcacctgaatacgctgaggctatcgcaacccgtgcaggtgcgctggctggcatctctccgatgttccaaccttgcgtagttcctcctaagccgtggactggcattactggtggtggctattgggctgcggggcgcaaacccctgcagttagtacgtactcgcagtctggcggcgcttcgccgctatgaagaagtgtcgatgccggaggtcatcaaagcagtcaacattgcgcagaatacagcatggcgtattaacaagaaagttctcgacgtagcgaataccatcacccaatggaaacactgtccagtcgcagatatccctgcgatggatcgtggcgaaatgccagctcgtccgttggacatcgataccaacgagattgcacttaaagcgtggaagaaagaagcttccgcgttctaccgcaaagacaaagcacgcgttagccgtcgtctgtcaatggagtttatgttatctcaggcgaacaagtttgcgaattatgaggcaatctggtttccgtggaacatggattggcgtgggcgcgtgtacgctgtcccgatgttcaatcctcagggcaacgatatgacgaaaggcctgctgacctttgcgcaggagaaacccattggtgaagacggcttctattggctcaagattcatggcgcaaatacagctggagtggataaagtaccgtttccacaacgcatcaaatttgttgaggataaccatacgaatattatggaatgcgcgaaagcaccgctggaaaacacttggtgggcggaacaggactcgccgttctgctttctggcgttctgctttgagtatgctggcgtcatcaatagtggtctgtcgtacaactgtagcttgcctctggcattcgatggtagttgctccggcctgcaacatttctcagcgatgttacgcgacgaaattggcggcaaagctgtgaatctcctcccatctgcggaataccaggatatttatcgtatcgtcagcgacaaagttaacgagatgctgaaacaagatctgattaacggtacctctaccaccgtggaaacggtgactgataagaagacaggcgaaattacccaacgcacgaaatacgggaccaaagttatggcacagtggtggttagaacacggtgtgaatcgtggcgtcacgaaacgctcggttatgactttggtgtatggggcgctggagtttggattccgcgatcaagtgctgagtgacaccattcaaaaagcgatcgataacggcaagggtgacatgtttctgaatccgaatcaggctgctggttacatggcgaaactgatctggaacgcagtgtccgggaccgtagtcgcagcagttgaggcgatgaactggctgaaaagtgcggcgaaattacttgctgctgaagtgaaggatcgtaagacggatacagttctgcgtggccgctgcgcagtacattgggtgactcccgacggcttccctgtgtggcaggaatacaagaagcctattcagacgcgcttgaacctgatgttcctcggtcagttccgcttacagcctaccattaacaccaacaaagatagcgagattgatgcgcgcaaacaggtgtctggtatcgctcctaactttgtacacagcctggacggtaaccaccttcgtatgactgtagtgtgggcacacgagaagtacggaatcgaatcttttgcactgattcacgactccttcggtaccattccggctgacgctgcgaacctgttcaaagcagtgcgcgaaactttcgttgacacatatgagtcttgtgatgtactggctgatttctacgaccagattgctgaccagttgcacgagtctcaacgcgacaaaatgccagcacttccggctaaaggtaacttgaacctccgtgacatcttaaaatcggacttcgcgttcgcg

SEQ ID NO: 1838 - protein, 890 aa, synthetic construct
  REGION 1..890: note = Variant of RNA polymerase
MHHHHHHMNTINIAKNDFSDIELAAIPFNTLADHYGERLAREQLALEHESYEMGEARFRKMFERQLKAGEVADNAAAKPLITTLLPKMIARINDWFEEVKAKRGKRPTAFQFLQEIKPEAVAYITIKTTLACLTSADNTTVQAVASAIGKAIEDEARFGRIRDLEAKHFKKNVEEQLNKRVGHVYKKAFMQVVEHDMLSKGLLGGVVWSSWHKEDSIHVGVRCIEMLIESTGMVSLHRQNAGVVGQDSERIELAPEYAEAIATRAGALAGISPMFQPCVVPPKPWTGITGGGYWAAGRKPLQLVRTRSLAALRRYEEVSMPEVIKAVNIAQNTAWRINKKVLDVANTITQWKHCPVADIPAMDRGEMPARPLDIDTNEIALKAWKKEASAFYRKDKARVSRRLSMEFMLSQANKFANYEAIWFPWNMDWRGRVYAVPMFNPQGNDMTKGLLTFAQEKPIGEDGFYWLKIHGANTAGVDKVPFPQRIKFVEDNHTNIMECAKAPLENTWWAEQDSPFCFLAFCFEYAGVINSGLSYNCSLPLAFDGSCSGLQHFSAMLRDEIGGKAVNLLPSAEYQDIYRIVSDKVNEMLKQDLINGTSTTVETVTDKKTGEITQRTKYGTKVMAQWWLEHGVNRGVTKRSVMTLVYGALEFGFRDQVLSDTIQKAIDNGKGDMFLNPNQAAGYMAKLIWNAVSGTVVAAVEAMNWLKSAAKLLAAEVKDRKTDTVLRGRCAVHWVTPDGFPVWQEYKKPIQTRLNLMFLGQFRLQPTINTNKDSEIDARKQVSGIAPNFVHSLDGNHLRMTVVWAHEKYGIESFALIHDSFGTIPADAANLFKAVRETFVDTYESCDVLADFYDQIADQLHESQRDKMPALPAKGNLNLRDILKSDFAFA

SEQ ID NO: 1839 - DNA, 2670 bp, synthetic construct
  misc_feature 1..2670: note = Variant of RNA polymerase
  source 1..2670: mol_type = other DNA
atgcaccatcaccatcaccatatgaacacgattaacattgctaagaacgacttctctgacatcgaactggctgctatcccgttcaacactctggctgaccattacggtgagcgtttagctcgcgaacagttggcccttgagcatgagtcttacgagatgggtgaagcacgcttccgcaagatgtttgagcgtcaacttaaagctggtgaggttgcggataacgctgccgccaagcctctcatcactaccctactccctaagatgattgcacgcatcaacgactggtttgaggaagtgaaagccaagcgcggcaagcgcccgacagccttccagttcctgcaagaaatcaagccggaagccgtagcgtacatcaccattaagaccactctggctctgctaaccagtgcggacaatacaaccgttcaggctgtagcaagcgcaatcggtcgggccattgaggacgaggctcgcttcggtcgtatccgtgaccttgaagctaagcacttcaagaagaacgttgaggaacaactcaacaagcgcgtagggcacgtctacaagaaagcatttatgcaagttgtcgagcacgacatgctctctaagggtctactcgggggcgtggtatggtcgtcgtggcataaggaagactctattcatgtaggagtacgctgcatcgagatgctcattgagtcaaccggaatggttagcttacaccgccaaaatgctggcgtagtaggtcaagactctgagcgtatcgaactcgcacctgaatacgctgaggctatcgcaacccgtgcaggtgcgctggctggcatctctccgatgttccaaccttgcgtagttcctcctaagccgtggactggcattactggtggtggctattgggctgcggggcgcaaacccctgcagttagtacgtactcgcagtctggcggcgcttcgccgctatgaagaagtgtcgatgccggaggtcatcaaagcagtcaacattgcgcagaatacagcatggcgtattaacaagaaagttctcgacgtagcgaataccatcacccaatggaaacactgtccagtcgctgatatccctgcgatggatcgtggcgaaatgccagctcgtccgttggacatcgataccaacgagattgcacttaaagcgtggaagaaagaagcttccgcgttctaccgcaaagacaaagcacgcgttagccgtcgtctgtcaatggagtttatgttatctcaggcgaacaagtttgcgaattatgaggcaatctggtttccgcaaaacatggattggcgtgggcgcgtgtacgctgtcccgatgttcaatcctcagggcaacgatatgacgaaaggcctgctgacctttgcgcaggagaaacccattggtgaagacggcttctattggctcaagattcatggcgcaaatacagctggagtggataaagtaccgtttccacaacgcatcaaatttgttgaggataaccatacgaatattatggaatgcgcgaaagcaccgctggaaaacacttggtgggcggaacaggactcgccgttctgctttctggcgttctgctttgagtatgctggcgtcatcaatagtggtctgtcgtacaactgtagcttgcctctggcattcgatggtagttgctccggcctgcaacatttctcagcgatgttacgcgacgaaattggcggcaaagctgtgaatctcctcccatctgcggaataccaggatatttatcgtatcgtcagcgacaaagttaacgagatgctgaaacaagatctgattaacggtacctctaccaccgtggaaacggtgactgataagaagacaggcgaaattacccaacgcacgaaatacgggaccaaagttatggcacagtggtggttagaacacggtgtgaatcgtggcgtcacgaaacgctcggttatgactttggtgtatggggcgctggagtttggattccgcgatcaagtgctgagtgacaccattcaaaaagcgatcgataacggcaagggtgacatgtttctgaatccgaatcaggctgctggttacatggcgaaactgatctggaacgcagtgtccgggaccgtagtcgcagcagttgaggcgatgaactggctgaaaagtgcggcgaaattacttgctgctgaagtgaaggatcgtaagacggatacagttctgcgtggccgctgcgcagtacattgggtgactcccgacggcttccctgtgtggcaggaatacaagaagcctattcagacgcgcttgaacctgatgttcctcggtcagttccgcttacagcctaccattaacaccaacaaagatagcgagattgatgtgcgcaaacaggtgtctggtatcgctcctaactttgtacacagcctggacggtaaccaccttcgtatgactgtagtgtgggcacacgagaagtacggaatcgaatcttttgcactgattcacgactccttcggtaccattccggctgacgctgcgaacctgttcaaagcagtgcgcgaaactttcgttgacacatatgagtcttgtgatgtactggctgatttctacgaccagattgctgaccagttgcacgagtctcaacgcgacaaaatgccagcacttccggctaaaggtaacttgaacctccgtgacatcttaaaatcggacttcgcgttcgcg

SEQ ID NO: 1840 - protein, 890 aa, synthetic construct
  REGION 1..890: note = Variant of RNA polymerase
MHHHHHHMNTINIAKNDFSDIELAAIPFNTLADHYGERLAREQLALEHESYEMGEARFRKMFERQLKAGEVADNAAAKPLITTLLPKMIARINDWFEEVKAKRGKRPTAFQFLQEIKPEAVAYITIKTTLALLTSADNTTVQAVASAIGRAIEDEARFGRIRDLEAKHFKKNVEEQLNKRVGHVYKKAFMQVVEHDMLSKGLLGGVVWSSWHKEDSIHVGVRCIEMLIESTGMVSLHRQNAGVVGQDSERIELAPEYAEAIATRAGALAGISPMFQPCVVPPKPWTGITGGGYWAAGRKPLQLVRTRSLAALRRYEEVSMPEVIKAVNIAQNTAWRINKKVLDVANTITQWKHCPVADIPAMDRGEMPARPLDIDTNEIALKAWKKEASAFYRKDKARVSRRLSMEFMLSQANKFANYEAIWFPQNMDWRGRVYAVPMFNPQGNDMTKGLLTFAQEKPIGEDGFYWLKIHGANTAGVDKVPFPQRIKFVEDNHTNIMECAKAPLENTWWAEQDSPFCFLAFCFEYAGVINSGLSYNCSLPLAFDGSCSGLQHFSAMLRDEIGGKAVNLLPSAEYQDIYRIVSDKVNEMLKQDLINGTSTTVETVTDKKTGEITQRTKYGTKVMAQWWLEHGVNRGVTKRSVMTLVYGALEFGFRDQVLSDTIQKAIDNGKGDMFLNPNQAAGYMAKLIWNAVSGTVVAAVEAMNWLKSAAKLLAAEVKDRKTDTVLRGRCAVHWVTPDGFPVWQEYKKPIQTRLNLMFLGQFRLQPTINTNKDSEIDVRKQVSGIAPNFVHSLDGNHLRMTVVWAHEKYGIESFALIHDSFGTIPADAANLFKAVRETFVDTYESCDVLADFYDQIADQLHESQRDKMPALPAKGNLNLRDILKSDFAFA

SEQ ID NO: 1841 - DNA, 2670 bp, synthetic construct
  misc_feature 1..2670: note = Variant of RNA polymerase
  source 1..2670: mol_type = other DNA
atgcaccatcaccatcaccatatgaacacgattaacattgctaagaacgacttctctgacatcgaactggctgctatcccgttcaacactctggctgaccattacggtgagcgtttagctcgcgaacagttggcccttgagcatgagtcttacgagatgggtgaagcacgcttccgcaagatgtttgagcgtcaacttaaagctggtgaggttgcggataacgctgccgccaagcctctcatcactaccctactccctaagatgattgcacgcatcaacgactggtttgaggaagtgaaagctaagcgcggcaagcgcccgacagccttccagttcctgcaagaaatcaagccggaagccgtagcgtacatcaccattaagaccactctggcttgcctaaccagtgcggacaatcgtactgttcaggctgtggcaagcgcaatcggtcgggccattgaggacgaggctcgcttcggtcgtatccgtgaccttgaagctaagcacttcaagaagaacgttgaggaacaactcaacaagcgcgtagggcacgtctacaagaaagcatttatgcaagttgtcgagcacgacatgctctctaagggtctactcggtggcgaggcgtggtcttcgtggcataaggaagactctattcatgtaggagtacgctgcatcgagatgctcattgagtcaaccggaatggttagcttacaccgccaaaatgctggcgtagtaggtcaagactctgagcgtatcgaactcgcacctgaatacgctgaggctatcgcaacccgtgcaggtgcgctggctggcatctctccgatgttccaaccttgcgtagttcctcctaagccgtggactggcattactggtggtggctattgggctgcggggcgcaaacccctgcagttagtacgtactcgcagtctggcggcgcttcgccgctatgaagaagtgtcgatgccggaggtcatcaaagcagtcaacattgcgcagaatacagcatggcgtattaacaagaaagttctcgacgtagcgaataccatcacccaatggaaacactgtccagtcgctgatatccctgcgatggatcgtggcgaaatgccagctcgtccgttggacatcgataccaacgagattgcacttaaagcgtggaagaaagaagcttccgcgttctaccgcaaagacaaagcacgcgttagccgtcgtctgtcaatggagtttatgttatctcaggcgaacaagtttgcgaattatgaggcaatctggtttccgcaaaacatggattggcgtgggcgcgtgtacgctgtcccgatgttcaatcctcagggcaacgatatgacgaaaggcctgctgacctttgcgcaggagaaacccattggtgaagacggcttctattggctcaagattcatggcgcaaatacagctggagtggataaagtaccgtttccacaacgcatcaaatttgttgaggataaccatacgaatattatggaatgcgcgaaagcaccgctggaaaacacttggtgggcggaacaggactcgccgttctgctttctggcgttctgctttgagtatgctggcgtcatcaatagtggtctgtcgtacaactgtagcttgcctctggcatttgatggtagttgctccggcctgcaacatttctcagcgatgttacgcgacgaaattggcggcaaagctgtgaatctcctcccatctgcggaataccaggatatttatcgtatcgtcagcgacaaagttaacgagatgctgaaacaagatctgattaacggtacctctaccaccgtggaaacggtgactgataagaagacaggcgaaattacccaacgcacgaaatacgggaccaaagttatggcacagtggtggttagaacacggtgtgaatcgtggcgtcacgaaacgctcggttatgactttggtgtatggggcgctggagtttggattccgcgatcaagtgctgaaggacaccgtccagaaagcgatcgataacggcaagggtgacatgtttctgaatccgaatcaggctgctggttacatggcgaaactgatctggaacgcagtgtccgggaccgtagtcgcagcagttgaggcgatgaactggctgaaaagtgcggcgaaattacttgctgctgaagtgaaggatcgtaagacggatacagttctgcgtggccgctgcgcagtacattgggtgactcccgacggcttccctgtgtggcaggaatacaagaagcctattcagacgcgcttgaacctgatgttcctcggtcagttccgcttacagcctaccattaacaccaacaaagatagcgagattgatgcacgcaaacagatgtctgctatcgctcctaactttgtacacagcctggacggtaaccaccttcgtatgactgtagtgtgggcacacgagaagtacggaatcgaatcttttgcactgattcacgactccttcggtaccattccggctgacgctgcgaacctgttcaaagcagtgcgcgaaactttcgttgacacatatgagtcttgtgatgtactggctgatttctacgaccagattgctgaccagttgcacgagtctcaacgcgacaaaatgccagcacttccggctaaaggtaacttgaacctccgtgacatcttaaaatcggacttcgcgttcgcg

SEQ ID NO: 1842 - protein, 890 aa, synthetic construct
  REGION 1..890: note = Variant of RNA polymerase
MHHHHHHMNTINIAKNDFSDIELAAIPFNTLADHYGERLAREQLALEHESYEMGEARFRKMFERQLKAGEVADNAAAKPLITTLLPKMIARINDWFEEVKAKRGKRPTAFQFLQEIKPEAVAYITIKTTLACLTSADNRTVQAVASAIGRAIEDEARFGRIRDLEAKHFKKNVEEQLNKRVGHVYKKAFMQVVEHDMLSKGLLGGEAWSSWHKEDSIHVGVRCIEMLIESTGMVSLHRQNAGVVGQDSERIELAPEYAEAIATRAGALAGISPMFQPCVVPPKPWTGITGGGYWAAGRKPLQLVRTRSLAALRRYEEVSMPEVIKAVNIAQNTAWRINKKVLDVANTITQWKHCPVADIPAMDRGEMPARPLDIDTNEIALKAWKKEASAFYRKDKARVSRRLSMEFMLSQANKFANYEAIWFPQNMDWRGRVYAVPMFNPQGNDMTKGLLTFAQEKPIGEDGFYWLKIHGANTAGVDKVPFPQRIKFVEDNHTNIMECAKAPLENTWWAEQDSPFCFLAFCFEYAGVINSGLSYNCSLPLAFDGSCSGLQHFSAMLRDEIGGKAVNLLPSAEYQDIYRIVSDKVNEMLKQDLINGTSTTVETVTDKKTGEITQRTKYGTKVMAQWWLEHGVNRGVTKRSVMTLVYGALEFGFRDQVLKDTVQKAIDNGKGDMFLNPNQAAGYMAKLIWNAVSGTVVAAVEAMNWLKSAAKLLAAEVKDRKTDTVLRGRCAVHWVTPDGFPVWQEYKKPIQTRLNLMFLGQFRLQPTINTNKDSEIDARKQMSAIAPNFVHSLDGNHLRMTVVWAHEKYGIESFALIHDSFGTIPADAANLFKAVRETFVDTYESCDVLADFYDQIADQLHESQRDKMPALPAKGNLNLRDILKSDFAFA

SEQ ID NO: 1843 - DNA, 2670 bp, synthetic construct
  misc_feature 1..2670: note = Variant of RNA polymerase
  source 1..2670: mol_type = other DNA
atgcaccatcaccatcaccatatgaacacgattaacattgctaagaacgacttctctgacatcgaactggctgctatcccgttcaacactctggctgaccattacggtgagcgtttagctcgcgaacagttggcccttgagcatgagtcttacgagatgggtgaagcacgcttccgcaagatgtttgagcgtcaacttaaagctggtgaggttgcggataacgctgccgccaagcctctcatcactaccctactccctaagatgattgcacgcatcaacgactggtttgaggaagtgaaagctaagcgcggcaagcgcccgacagccttccagttcctgcaagaaatcaagccggaagccgtagcgtacatcaccattaagaccactctggcttgcctaaccagtgcggacaatacgcgtgttcaggctgtggcaagcgcaatcggtcgggccattgaggacgaggctcgcttcggtcgtatccgtgaccttgaagctaagcacttcaagaagaacgttgaggaacaactcaacaagcgcgtagggcacgtctacaagaaagcatttatgcaagttgtcgagcacgacatgctctctaagggtctactcggtggcgaggcgtggtcttcgtggcataaggaagactctattcatgtaggagtacgctgcatcgagatgctcattgagtcaaccggaatggttagcttacaccgccaaaatgctggcgtagtaggtcaagactctgagcgtatcgaactcgcacctgaatacgctgaggctatcgcaacccgtgcaggtgcgctggctggcatctctccgatgttccaaccttgcgtagttcctcctaagccgtggactggcattactggtggtggctattgggctgcggggcgcaaacccctgcagttagtacgtactcgcagtctggcggcgcttcgccgctatgaagaagtgtcgatgccggaggtcatcaaagcagtcaacattgcgcagaatacagcatggcgtattaacaagaaagttctcgacgtagcgaataccatcacccaatggaaacactgtccagtcgctgatatccctgcgatggatcgtggcgaaatgccagctcgtccgttggacatcgataccaacgagattgcacttaaagcgtggaagaaagaagcttccgcgttctaccgcaaagacaaagcacgcgttagccgtcgtctgtcaatggagtttatgttatctcaggcgaacaagtttgcgaattatgaggcaatctggtttccgcaaaacatggattggcgtgggcgcgtgtacgctgtcccgatgttcaatcctcagggcaacgatatgacgaaaggcctgctgacctttgcgcaggagaaacccattggtgaagacggcttctattggctcaagattcatggcgcaaatacagctggagtggataaagtaccgtttccacaacgcatcaaatttgttgaggataaccatacgaatattatggaatgcgcgaaagcaccgctggaaaacacttggtgggcggaacaggactcgccgttctgctttctggcgttctgctttgagtatgctggcgtcatcaatagtggtctgtcgtacaactgtagcttgcctctggcatttgatggtagttgctccggcctgcaacatttctcagcgatgttacgcgacgaaattggcggcaaagctgtgaatctcctcccatctgcggaataccaggatatttatcgtatcgtcagcgacaaagttaacgagatgctgaaacaagatctgattaacggtacctctaccaccgtggaaacggtgactgataagaagacaggcgaaattacccaacgcacgaaatacgggaccaaagttatggcacagtggtggttagaacacggtgtgaatcgtggcgtcacgaaacgctcggttatgactttggtgtatggggcgctggagtttggattccgcgatcaagtgctgagtgacaccgtccagaaagcgatcgataacggcaagggtgacatgtttctgaatccgaatcaggctgctggttacatggcgaaactgatctggaacgcagtgtccgggaccgtagtcgcagcagttgaggcgatgaactggctgaaaagtgcggcgaaattacttgctgctgaagtgaaggatcgtaagacggatacagttctgcgtggccgctgcgcagtacattgggtgactcccgacggcttccctgtgtggcaggaatacaagaagcctattcagacgcgcttgaacctgatgttcctcggtcagttccgcttacagcctaccattaacaccaacaaagatagcgagattgatgcacgcaaacagatgtctggtatcgctcctaactttgtacacagcctggacgggaaccaccttcgtatgactgtagtgtgggcacacgagaagtacggaatcgaatcttttgcactgattcacgactccttcggtaccattccggctgacgctgcgaacctgttcaaagcagtgcgcgaaactttcgttgacacatatgagtcttgtgatgtactggctgatttctacgaccagattgctgaccagttgcacgagtctcaacgcgacaaaatgccagcacttccggctaaaggtaacttgaacctccgtgacatcttaaaatcggacttcgcgttcgcg

SEQ ID NO: 1844 - protein, 890 aa, synthetic construct
  REGION 1..890: note = Variant of RNA polymerase
MHHHHHHMNTINIAKNDFSDIELAAIPFNTLADHYGERLAREQLALEHESYEMGEARFRKMFERQLKAGEVADNAAAKPLITTLLPKMIARINDWFEEVKAKRGKRPTAFQFLQEIKPEAVAYITIKTTLACLTSADNTRVQAVASAIGRAIEDEARFGRIRDLEAKHFKKNVEEQLNKRVGHVYKKAFMQVVEHDMLSKGLLGGEAWSSWHKEDSIHVGVRCIEMLIESTGMVSLHRQNAGVVGQDSERIELAPEYAEAIATRAGALAGISPMFQPCVVPPKPWTGITGGGYWAAGRKPLQLVRTRSLAALRRYEEVSMPEVIKAVNIAQNTAWRINKKVLDVANTITQWKHCPVADIPAMDRGEMPARPLDIDTNEIALKAWKKEASAFYRKDKARVSRRLSMEFMLSQANKFANYEAIWFPQNMDWRGRVYAVPMFNPQGNDMTKGLLTFAQEKPIGEDGFYWLKIHGANTAGVDKVPFPQRIKFVEDNHTNIMECAKAPLENTWWAEQDSPFCFLAFCFEYAGVINSGLSYNCSLPLAFDGSCSGLQHFSAMLRDEIGGKAVNLLPSAEYQDIYRIVSDKVNEMLKQDLINGTSTTVETVTDKKTGEITQRTKYGTKVMAQWWLEHGVNRGVTKRSVMTLVYGALEFGFRDQVLSDTVQKAIDNGKGDMFLNPNQAAGYMAKLIWNAVSGTVVAAVEAMNWLKSAAKLLAAEVKDRKTDTVLRGRCAVHWVTPDGFPVWQEYKKPIQTRLNLMFLGQFRLQPTINTNKDSEIDARKQMSGIAPNFVHSLDGNHLRMTVVWAHEKYGIESFALIHDSFGTIPADAANLFKAVRETFVDTYESCDVLADFYDQIADQLHESQRDKMPALPAKGNLNLRDILKSDFAFA

SEQ ID NO: 1845 - DNA, 2670 bp, synthetic construct
  misc_feature 1..2670: note = Variant of RNA polymerase
  source 1..2670: mol_type = other DNA
atgcaccatcaccatcaccatatgaacacgattaacattgctaagaacgacttctctgacatcgaactggctgctatcccgttcaacactctggctgaccattacggtgagcgtttagctcgcgaacagttggcccttgagcatgagtcttacgagatgggtgaagcacgcttccgcaagatgtttgagcgtcaacttaaagctggtgaggttgcggataacgctgccgccaagcctctcatcactaccctactccctaagatgattgcacgcatcaacgactggtttgaggaagtgaaagctaagcgcggcaagcgcccgacagccttccagttcctgcaagaaatcaagccggaagccgtagcgtacatcaccattaagaccactctggcttgcctaaccagtgcggacaatacaaccgttcaggctgtagcaagcgcaatcggtcgggccattgaggacgaggctcgcttcggtcgtatccgtgaccttgaagctaagcacttcaagaagaacgttgaggaacaactcaacaagcgcgtagggcacgtctacaagaaagcatttatgcaagttgtcgagcacgacatgctctctaagggtctactcggtggcggggcgtggtctatgtggcataaggaagactctattcatgtaggagtacgctgcatcgagatgctcattgagtcaaccggaatggttagcttacaccgccaaaatgctggcgtagtaggtcaagactctgagcgtatcgaactcgcacctgaatacgctgaggctatcgcaacccgtgcaggtgcgctggctggcatctctccgatgttccaaccttgcgtagttcctcctaagccgtggactggcattactggtggtggctattgggctgcggggcgcaaacccctgcagttagtacgtactcgcagtctggcggcgcttcgccgctatgaagaagtgtcgatgccggaggtcatcaaagcagtcaacattgcgcagaatacagcatggcgtattaacaagaaagttctcgacgtagcgaataccatcacccaatggaaacactgtccagtcgctgatatccctgcgatggatcgtggcgaaatgccagctcgtccgttggacatcgataccaacgagattgcacttaaagcgtggaagaaagaagcttccgcgttctaccgcaaagacaaagcacgcgttagccgtcgtctgtcaatggagtttatgttatctcaggcgaacaagtttgcgaattatgaggcaatctggtttccgcaaaacatggattggcgtgggcgcgtgtacgctgtcccgatgttcaatcctcagggcaacgatatgacgaaaggcctgctgacctttgcgcaggagaaacccattggtgaagacggcttctattggctcaagattcatggcgcaaatacagctggagtggataaagtaccgtttccacaacgcatcaaatttgttgaggataaccatacgaatattatggaatgcgcgaaagcaccgctggaaaacacttggtgggcggaacaggactcgccgttctgctttctggcgttctgctttgagtatgctggcgtcatcaatagtggtctgtcgtacaactgtagcttgcctctggcatttgatggtagttgctccggcctgcaacatttctcagcgatgttacgcgacgaaattggcggcaaagctgtgaatctcctcccatctgcggaataccaggatatttatcgtatcgtcagcgacaaagttaacgagatgctgaaacaagatctgattaacggtacctctaccaccgtggaaacggtgactgataagaagacaggcgaaattacccaacgcacgaaatacgggaccaaagttatggcacagtggtggttagaacacggtgtgactcgtggcgtcacgaaacgctcggttatgactttggtgtatggggcgctggagtttggattccgcgatcaagtgctgggtgacaccatccagaaagcgatcgataacggcaagggtgacatgtttctgaatccgaatcaggctgctggttacatggcgaaactgatctggaacgcagtgtccgggaccgtagtcgcagcagttgaggcgatgaactggctgaaaagtgcggcgaaattacttgctgctgaagtgaaggatcgtaagacggatacagttctgcgtggccgctgcgcagtacattgggtgactcccgacggcttccctgtgtggcaggaatacaagaagcctattcagacgcgcttgaacctgatgttcctcggtcagttccgcttacagcctaccattaacaccaacaaagatagcgagattgatgcacgcaaacaggtttctggtatcgctcctaactttgtacacagcctggacggtaaccaccttcgtatgactgtagtgtgggcacacgagaagtacggaatcgaatcttttgcactgattcacgactccttcggtaccattccggctgacgctgcgaacctgttcaaagcagtgcgcgaaactttcgttgacacatatgagtcttgtgatgtactggctgatttctacgaccagattgctgaccagttgcacgagtctcaacgcgacaaaatgccagcacttccggctaaaggtaacttgaacctccgtgacatcttaaaatcggacttcgcgttcgcg

SEQ ID NO: 1846 - protein, 890 aa, synthetic construct
  REGION 1..890: note = Variant of RNA polymerase
MHHHHHHMNTINIAKNDFSDIELAAIPFNTLADHYGERLAREQLALEHESYEMGEARFRKMFERQLKAGEVADNAAAKPLITTLLPKMIARINDWFEEVKAKRGKRPTAFQFLQEIKPEAVAYITIKTTLACLTSADNTTVQAVASAIGRAIEDEARFGRIRDLEAKHFKKNVEEQLNKRVGHVYKKAFMQVVEHDMLSKGLLGGGAWSMWHKEDSIHVGVRCIEMLIESTGMVSLHRQNAGVVGQDSERIELAPEYAEAIATRAGALAGISPMFQPCVVPPKPWTGITGGGYWAAGRKPLQLVRTRSLAALRRYEEVSMPEVIKAVNIAQNTAWRINKKVLDVANTITQWKHCPVADIPAMDRGEMPARPLDIDTNEIALKAWKKEASAFYRKDKARVSRRLSMEFMLSQANKFANYEAIWFPQNMDWRGRVYAVPMFNPQGNDMTKGLLTFAQEKPIGEDGFYWLKIHGANTAGVDKVPFPQRIKFVEDNHTNIMECAKAPLENTWWAEQDSPFCFLAFCFEYAGVINSGLSYNCSLPLAFDGSCSGLQHFSAMLRDEIGGKAVNLLPSAEYQDIYRIVSDKVNEMLKQDLINGTSTTVETVTDKKTGEITQRTKYGTKVMAQWWLEHGVTRGVTKRSVMTLVYGALEFGFRDQVLGDTIQKAIDNGKGDMFLNPNQAAGYMAKLIWNAVSGTVVAAVEAMNWLKSAAKLLAAEVKDRKTDTVLRGRCAVHWVTPDGFPVWQEYKKPIQTRLNLMFLGQFRLQPTINTNKDSEIDARKQVSGIAPNFVHSLDGNHLRMTVVWAHEKYGIESFALIHDSFGTIPADAANLFKAVRETFVDTYESCDVLADFYDQIADQLHESQRDKMPALPAKGNLNLRDILKSDFAFA

SEQ ID NO: 1847 - DNA, 2670 bp, synthetic construct
  misc_feature 1..2670: note = Variant of RNA polymerase
  source 1..2670: mol_type = other DNA
atgcaccatcaccatcaccatatgaacacgattaacattgctaagaacgacttctctgacatcgaactggctgctatcccgttcaacactctggctgaccattacggtgagcgtttagctcgcgaacagttggcccttgagcatgagtcttacgagatgggtgaagcacgcttccgcaagatgtttgagcgtcaacttaaagctggtgaggttgcggataacgctgccgccaagcctctcatcactaccctactccctaagatgattgcacgcatcaacgactggtttgaggaagtgaaagctaagcgcggcaagcgcccgacagccttccagttcctgcaagaaatcaagccggaagccgtagcgtacatcaccattaagaccactctggcttgcctaaccagtgcggacaatcgtactgttcaggctgtggcaagcgcaatcggtcgggccattgaggacgaggctcgcttcggtcgtatccgtgaccttgaagctaagcacttcaagaagaacgttgaggaacaactcaacaagcgcgtagggcacgtctacaagaaagcatttatgcaagttgtcgagcacgacatgctctctaagggtctactcggtggcgaggcgtggtctcgctggcataaggaagactctattcatgtaggagtacgctgcatcgagatgctcattgagtcaaccggaatggttagcttacaccgccaaaatgctggcgtagtaggtcaagactctgagcgtatcgaactcgcacctgaatacgctgaggctatcgcaacccgtgcaggtgcgctggctggcatctctccgatgttccaaccttgcgtagttcctcctaagccgtggactggcattactggtggtggctattgggctgcggggcgcaaacccctgcagttagtacgtactcgcagtctggcggcgcttcgccgctatgaagaagtgtcgatgccggaggtcatcaaagcagtcaacattgcgcagaatacagcatggcgtattaacaagaaagttctcgacgtagcgaataccatcacccaatggaaacactgtccagtcgctgatatccctgcgatggatcgtggcgaaatgccagctcgtccgttggacatcgataccaacgagattgcacttaaagcgtggaagaaagaagcttccgcgttctaccgcaaagacaaagcacgcgttagccgtcgtctgtcaatggagtttatgttatctcaggcgaacaagtttgcgaattatgaggcaatctggtttccgcaaaacatggattggcgtgggcgcgtgtacgctgtcccgatgttcaatcctcagggcaacgatatgacgaaaggcctgctgacctttgcgcaggagaaacccattggtgaagacggcttctattggctcaagattcatggcgcaaatacagctggagtggataaagtaccgtttccacaacgcatcaaatttgttgaggataaccatacgaatattatggaatgcgcgaaagcaccgctggaaaacacttggtgggcggaacaggactcgccgttctgctttctggcgttctgctttgagtatgctggcgtcatcaatagtggtctgtcgtacaactgtagcttgcctctggcatttgatggtagttgctccggcctgcaacatttctcagcgatgttacgcgacgaaattggcggcaaagctgtgaatctcctcccatctgcggaataccaggatatttatcgtatcgtcagcgacaaagttaacgagatgctgaaacaagatctgattaacggtacctctaccaccgtggaaacggtgactgataagaagacaggcgaaattacccaacgcacgaaatacgggaccaaagttatggcacagtggtggttagaacacggtgtgactcgtggcgtcacgaaacgctcggttatgactttggtgtatggggcgctggagtttggattccgcgatcaagtgctgagtgacaccgtccagaaagcgatcgataacggcaagggtgacatgtttctgaatccgaatcaggctgctggttacatggcgaaactgatctggaacgcagtgtccgggaccgtagtcgcagcagttgaggcgatgaactggctgaaaagtgcggcgaaattacttgctgctgaagtgaaggatcgtaagacggatacagttctgcgtggccgctgcgcagtacattgggtgactcccgacggcttccctgtgtggcaggaatacaagaagcctattcagacgcgcttgaacctgatgttcctcggtcagttccgcttacagcctaccattaacaccaacaaagatagcgagattgatgcacgcaaacagatgtctggtatcgctcctaactttgtacacagcctggacgggaaccaccttcgtatgactgtagtgtgggcacacgagaagtacggaatcgaatcttttgcactgattcacgactccttcggtaccattccggctgacgctgcgaacctgttcaaagcagtgcgcgaaactttcgttgacacatatgagtcttgtgatgtactggctgatttctacgaccagattgctgaccagttgcacgagtctcaacgcgacaaaatgccagcacttccggctaaaggtaacttgaacctccgtgacatcttaaaatcggacttcgcgttcgcg

SEQ ID NO: 1848 - protein, 890 aa, synthetic construct
  REGION 1..890: note = Variant of RNA polymerase
MHHHHHHMNTINIAKNDFSDIELAAIPFNTLADHYGERLAREQLALEHESYEMGEARFRKMFERQLKAGEVADNAAAKPLITTLLPKMIARINDWFEEVKAKRGKRPTAFQFLQEIKPEAVAYITIKTTLACLTSADNRTVQAVASAIGRAIEDEARFGRIRDLEAKHFKKNVEEQLNKRVGHVYKKAFMQVVEHDMLSKGLLGGEAWSRWHKEDSIHVGVRCIEMLIESTGMVSLHRQNAGVVGQDSERIELAPEYAEAIATRAGALAGISPMFQPCVVPPKPWTGITGGGYWAAGRKPLQLVRTRSLAALRRYEEVSMPEVIKAVNIAQNTAWRINKKVLDVANTITQWKHCPVADIPAMDRGEMPARPLDIDTNEIALKAWKKEASAFYRKDKARVSRRLSMEFMLSQANKFANYEAIWFPQNMDWRGRVYAVPMFNPQGNDMTKGLLTFAQEKPIGEDGFYWLKIHGANTAGVDKVPFPQRIKFVEDNHTNIMECAKAPLENTWWAEQDSPFCFLAFCFEYAGVINSGLSYNCSLPLAFDGSCSGLQHFSAMLRDEIGGKAVNLLPSAEYQDIYRIVSDKVNEMLKQDLINGTSTTVETVTDKKTGEITQRTKYGTKVMAQWWLEHGVTRGVTKRSVMTLVYGALEFGFRDQVLSDTVQKAIDNGKGDMFLNPNQAAGYMAKLIWNAVSGTVVAAVEAMNWLKSAAKLLAAEVKDRKTDTVLRGRCAVHWVTPDGFPVWQEYKKPIQTRLNLMFLGQFRLQPTINTNKDSEIDARKQMSGIAPNFVHSLDGNHLRMTVVWAHEKYGIESFALIHDSFGTIPADAANLFKAVRETFVDTYESCDVLADFYDQIADQLHESQRDKMPALPAKGNLNLRDILKSDFAFA

SEQ ID NO: 1849 - DNA, 2670 bp, synthetic construct
  misc_feature 1..2670: note = Variant of RNA polymerase
  source 1..2670: mol_type = other DNA
atgcaccatcaccatcaccatatgaacacgattaacattgctaagaacgacttctctgacatcgaactggctgctatcccgttcaacactctggctgaccattacggtgagcgtttagctcgcgaacagttggcccttgagcatgagtcttacgagatgggtgaagcacgcttccgcaagatgtttgagcgtcaacttaaagctggtgaggttgcggataacgctgccgccaagcctctcatcactaccctactccctaagatgattgcacgcatcaacgactggtttgaggaagtgaaagctaagcgcggcaagcgcccgacagccttccagttcctgcaagaaatcaagccggaagccgtagcgtacatcaccattaagaccactctggcttgcctaaccagtgcggacaatgcgactgttcaggctgtggcaagcgcaatcggtcgggccattgaggacgaggctcgcttcggtcgtatccgtgaccttgaagctaagcacttcaagaagaacgttgaggaacaactcaacaagcgcgtagggcacgtctacaagaaagcatttatgcaagttgtcgagcacgacatgctctctaagggtctactcggtggcggggcgtggtctatgtggcataaggaagactctattcatgtaggagtacgctgcatcgagatgctcattgagtcaaccggaatggttagcttacaccgccaaaatgctggcgtagtaggtcaagactctgagcgtatcgaactcgcacctgaatacgctgaggctatcgcaacccgtgcaggtgcgctggctggcatctctccgatgttccaaccttgcgtagttcctcctaagccgtggactggcattactggtggtggctattgggctgcggggcgcaaacccctgcagttagtacgtactcgcagtctggcggcgcttcgccgctatgaagaagtgtcgatgccggaggtcatcaaagcagtcaacattgcgcagaatacagcatggcgtattaacaagaaagttctcgacgtagcgaataccatcacccaatggaaacactgtccagtcgctgatatccctgcgatggatcgtggcgaaatgccagctcgtccgttggacatcgataccaacgagattgcacttaaagcgtggaagaaagaagcttccgcgttctaccgcaaagacaaagcacgcgttagccgtcgtctgtcaatggagtttatgttatctcaggcgaacaagtttgcgaattatgaggcaatctggtttccgcaaaacatggattggcgtgggcgcgtgtacgctgtcccgatgttcaatcctcagggcaacgatatgacgaaaggcctgctgacctttgcgcaggagaaacccattggtgaagacggcttctattggctcaagattcatggcgcaaatacagctggagtggataaagtaccgtttccacaacgcatcaaatttgttgaggataaccatacgaatattatggaatgcgcgaaagcaccgctggaaaacacttggtgggcggaacaggactcgccgttctgctttctggcgttctgctttgagtatgctggcgtcatcaatagtggtctgtcgtacaactgtagcttgcctctggcatttgatggtagttgctccggcctgcaacatttctcagcgatgttacgcgacgaaattggcggcaaagctgtgaatctcctcccatctgcggaataccaggatatttatcgtatcgtcagcgacaaagttaacgagatgctgaaacaagatctgattaacggtacctctaccaccgtggaaacggtgactgataagaagacaggcgaaattacccaacgcacgaaatacgggaccaaagttatggcacagtggtggttagaacacggtgtgaatcgtggcgtcacgaaacgctcggttatgactttggtgtatggggcgctggagtttggattccgcgatcaagtgctgaaggacaccatcgggaaagcgatcgataacggcaagggtgacatgtttctgaatccgaatcaggctgctggttacatggcgaaactgatctggaacgcagtgtccgggaccgtagtcgcagcagttgaggcgatgaactggctgaaaagtgcggcgaaattacttgctgctgaagtgaaggatcgtaagacggatacagttctgcgtggccgctgcgcagtacattgggtgactcccgacggcttccctgtgtggcaggaatacaagaagcctattcagacgcgcttgaacctgatgttcctcggtcagttccgcttacagcctaccattaacaccaacaaagatagcgagattgatgcacgcaaacaggtgtctggtatcgctcctaactttgtacacagcctggacgggaaccaccttcgtatgactgtagtgtgggcacacgagaagtacggaatcgaatcttttgcactgattcacgactccttcggtaccattccggctgacgctgcgaacctgttcaaagcagtgcgcgaaactttcgttgacacatatgagtcttgtgatgtactggctgatttctacgaccagattgctgaccagttgcacgagtctcaacgcgacaaaatgccagcacttccggctaaaggtaacttgaacctccgtgacatcttaaaatcggacttcgcgttcgcg

SEQ ID NO: 1850 - protein, 890 aa, synthetic construct
  REGION 1..890: note = Variant of RNA polymerase
MHHHHHHMNTINIAKNDFSDIELAAIPFNTLADHYGERLAREQLALEHESYEMGEARFRKMFERQLKAGEVADNAAAKPLITTLLPKMIARINDWFEEVKAKRGKRPTAFQFLQEIKPEAVAYITIKTTLACLTSADNATVQAVASAIGRAIEDEARFGRIRDLEAKHFKKNVEEQLNKRVGHVYKKAFMQVVEHDMLSKGLLGGGAWSMWHKEDSIHVGVRCIEMLIESTGMVSLHRQNAGVVGQDSERIELAPEYAEAIATRAGALAGISPMFQPCVVPPKPWTGITGGGYWAAGRKPLQLVRTRSLAALRRYEEVSMPEVIKAVNIAQNTAWRINKKVLDVANTITQWKHCPVADIPAMDRGEMPARPLDIDTNEIALKAWKKEASAFYRKDKARVSRRLSMEFMLSQANKFANYEAIWFPQNMDWRGRVYAVPMFNPQGNDMTKGLLTFAQEKPIGEDGFYWLKIHGANTAGVDKVPFPQRIKFVEDNHTNIMECAKAPLENTWWAEQDSPFCFLAFCFEYAGVINSGLSYNCSLPLAFDGSCSGLQHFSAMLRDEIGGKAVNLLPSAEYQDIYRIVSDKVNEMLKQDLINGTSTTVETVTDKKTGEITQRTKYGTKVMAQWWLEHGVNRGVTKRSVMTLVYGALEFGFRDQVLKDTIGKAIDNGKGDMFLNPNQAAGYMAKLIWNAVSGTVVAAVEAMNWLKSAAKLLAAEVKDRKTDTVLRGRCAVHWVTPDGFPVWQEYKKPIQTRLNLMFLGQFRLQPTINTNKDSEIDARKQVSGIAPNFVHSLDGNHLRMTVVWAHEKYGIESFALIHDSFGTIPADAANLFKAVRETFVDTYESCDVLADFYDQIADQLHESQRDKMPALPAKGNLNLRDILKSDFAFA

SEQ ID NO: 1851 - DNA, 2670 bp, synthetic construct
  misc_feature 1..2670: note = Variant of RNA polymerase
  source 1..2670: mol_type = other DNA
atgcaccatcaccatcaccatatgaacacgattaacattgctaagaacgacttctctgacatcgaactggctgctatcccgttcaacactctggctgaccattacggtgagcgtttagctcgcgaacagttggcccttgagcatgagtcttacgagatgggtgaagcacgcttccgcaagatgtttgagcgtcaacttaaagctggtgaggttgcggataacgctgccgccaagcctctcatcactaccctactccctaagatgattgcacgcatcaacgactggtttgaggaagtgaaagctaagcgcggcaagcgcccgacagccttccagttcctgcaagaaatcaagccggaagccgtagcgtacatcaccattaagaccgtgctggctatcctaaccagtgcggacaatacaaccgttcaggctgtagcaagcgcaatcggtaaagccattgaggacgaggctcgcttcggtcgtatccgtgaccttgaagctaagcacttcaagaagaacgttgaggaacaactcaacaagcgcgtagggcacgtctacaagaaagcatttatgcaagttgtcgagcacgacatgctctctaagggtctactcgagggcgaggtatggtcgtcgtggcataaggaagactctattcatgtaggagtacgctgcatcgagatgctcattgagtcaaccggaatggttagtttacaccgccaaaatgctggcgtagtaggtcaagactctgagcgtatcgaactcgcacctgaatacgctgaggctatcgcaacccgtgcaggtgcgctggctggcatctctccgatgttccaaccttgcgtagttcctcctaagccgtggactggcattactggtggtggctattgggctgcggggcgcaaacccctgcagttagtacgtactcgcagtctggcggcacttcgccgctatgaagaagtgtcgatgccggaggtcatcaaagcagtcaacattgcgcagaatacagcatggcgtattaacaagaaagttctcgacgtagcgaataccatcacccaatggaaacactgtccagtccgcgatatccctgcgatggatcgtggcgaaatgccagctcgtccgttggacatcgataccaacgagattgcacttaaagcgtggaagaaagaagcttccgcgttctaccgcaaagacaaagcacgcgttagccgtcgtctgtcaatggagtttatgttatctcaggcgaacaagtttgcgaattatgaggcaatctggtttccgcaaaacatggattggcgtgggcgcgtgtacgctgtcccgatgttcaatcctcagggcaacgatatgacgaaaggcctgctgacctttgcgcaggagaaacccattggtgaagacggcttctattggctcaagattcatggcgcaaatacagctggagtggataaagtaccgtttccacaacgcatcaaatttgttgaggataaccatacgaatattatggaatgcgcgaaagcaccgctggaaaacacttggtgggcggaacaggactcgccgttctgctttctggcgttctgctttgagtatgctggcgtcatcaatagtggtctgtcgtacaactgtagcttgcctctggcattcgatggtagttgctccggcctgcaacatttctcagcgatgttacgcgacgaaattggcggcaaagctgtgaatctcctcccatctgcggaataccaggatatttatcgtatcgtcagcgacaaagttaacgagatgctgaaacaagatctgattaacggtacctctaccaccgtggaaacggtgactgataagaagacaggcgaaattacccaacgcacgaaatacgggaccaaagttatggcacagtggtggttagaacacggtgtgaatcgtggcgtcacgaaacgctcggttatgactttggtgtatggggcgctggagtttggattccgcgatcaagtgctgagtgacaccattcaaaaagcgatcgataacggcaagggtgacatgtttctgaatccgaatcaggctgctggttacatggcgaaactgatctggaacgcagtgtccgggaccgtagtcgcagcagttgaggcgatgaactggctgaaaagtgcggcgaaattacttgctgctgaagtgaaggatcgtaagacggatacagttctgcgtggccgctgcgcagtacattgggtgactcccgacggcttccctgtgtggcaggaatacaagaagcctattcagacgcgcttgaacctgatgttcctcggtcagttccgcttacagcctaccattaacaccaacaaagatagcgagattgatgcgcgcaaacaggtgtctggtatcgctcctaactttgtacacagcctggacggtaaccaccttcgtatgactgtagtgtgggcacacgagaagtacggaatcgaatcttttgcactgattcacgactccttcggtaccattccggctgacgctgcgaacctgttcaaagcagtgcgcgaaactttcgttgacacatatgagtcttgtgatgtactggctgatttctacgaccagattgctgaccagttgcacgagtctcaacgcgacaaaatgccagcacttccggctaaaggtaacttgaacctccgtgacatcttaaaatcggacttcgcgttcgcg

SEQ ID NO: 1852 - protein, 890 aa, synthetic construct
  REGION 1..890: note = Variant of RNA polymerase
MHHHHHHMNTINIAKNDFSDIELAAIPFNTLADHYGERLAREQLALEHESYEMGEARFRKMFERQLKAGEVADNAAAKPLITTLLPKMIARINDWFEEVKAKRGKRPTAFQFLQEIKPEAVAYITIKTVLAILTSADNTTVQAVASAIGKAIEDEARFGRIRDLEAKHFKKNVEEQLNKRVGHVYKKAFMQVVEHDMLSKGLLEGEVWSSWHKEDSIHVGVRCIEMLIESTGMVSLHRQNAGVVGQDSERIELAPEYAEAIATRAGALAGISPMFQPCVVPPKPWTGITGGGYWAAGRKPLQLVRTRSLAALRRYEEVSMPEVIKAVNIAQNTAWRINKKVLDVANTITQWKHCPVRDIPAMDRGEMPARPLDIDTNEIALKAWKKEASAFYRKDKARVSRRLSMEFMLSQANKFANYEAIWFPQNMDWRGRVYAVPMFNPQGNDMTKGLLTFAQEKPIGEDGFYWLKIHGANTAGVDKVPFPQRIKFVEDNHTNIMECAKAPLENTWWAEQDSPFCFLAFCFEYAGVINSGLSYNCSLPLAFDGSCSGLQHFSAMLRDEIGGKAVNLLPSAEYQDIYRIVSDKVNEMLKQDLINGTSTTVETVTDKKTGEITQRTKYGTKVMAQWWLEHGVNRGVTKRSVMTLVYGALEFGFRDQVLSDTIQKAIDNGKGDMFLNPNQAAGYMAKLIWNAVSGTVVAAVEAMNWLKSAAKLLAAEVKDRKTDTVLRGRCAVHWVTPDGFPVWQEYKKPIQTRLNLMFLGQFRLQPTINTNKDSEIDARKQVSGIAPNFVHSLDGNHLRMTVVWAHEKYGIESFALIHDSFGTIPADAANLFKAVRETFVDTYESCDVLADFYDQIADQLHESQRDKMPALPAKGNLNLRDILKSDFAFA

SEQ ID NO: 1853 - DNA, 2670 bp, synthetic construct
  misc_feature 1..2670: note = Variant of RNA polymerase
  source 1..2670: mol_type = other DNA
atgcaccatcaccatcaccatatgaacacgattaacattgctaagaacgacttctctgacatcgaactggctgctatcccgttcaacactctggctgaccattacggtgagcgtttagctcgcgaacagttggcccttgagcatgagtcttacgagatgggtgaagcacgcttccgcaagatgtttgagcgtcaacttaaagctggtgaggttgcggataacgctgccgccaagcctctcatcactaccctactccctaagatgattgcacgcatcaacgactggtttgaggaagtgaaagctaagcgcggcaagcgcccgacagccttccagttcctgcaagaaatcaagccggaagccgtagcgtacatcaccattaagaccactctggcttgcctaaccagtgcggacaatcgtactgttcaggctctggcaagcgcaatcggtcgggccattgaggacgaggctcgcttcggtcgtatccgtgaccttgaagctaagcacttcaagaagaacgttgaggaacaactcaacaagcgcgtagggcacgtctacaagaaagcatttatgcaagttgtcgagcacgacatgctctctaagggtctactcggtggcgaggcgtggtcttcgtggcataaggaagactctattcatgtaggagtacgctgcatcgagatgctcattgagtcaaccggaatggttagcttacaccgccaaaatgctggcgtagtaggtcaagactctgagcgtatcgaactcgcacctgaatacgctgaggctatcgcaacccgtgcaggtgcgctggctggcatctctccgatgttccaaccttgcgtagttcctcctaagccgtggactggcattactggtggtggctattgggctgcggggcgcaaacccctgcagttagtacgtactcgcagtctggcggcgcttcgccgctatgaagaagtgtcgatgccggaggtcatcaaagcagtcaacattgcgcagaatacagcatggcgtattaacaagaaagttctcgacgtagcgaataccatcacccaatggaaacactgtccagtcgctgatatccctgcgatggatcgtggcgaaatgccagctcgtccgttggacatcgataccaacgagattgcacttaaagcgtggaagaaagaagcttccgcgttctaccgcaaagacaaagcacgcgttagccgtcgtctgtcaatggagtttatgttatctcaggcgaacaagtttgcgaattatgaggcaatctggtttccgcaaaacatggattggcgtgggcgcgtgtacgctgtcccgatgttcaatcctcagggcaacgatatgacgaaaggcctgctgacctttgcgcaggagaaacccattggtgaagacggcttctattggctcaagattcatggcgcaaatacagctggagtggataaagtaccgtttccacaacgcatcaaatttgttgaggataaccatacgaatattatggaatgcgcgaaagcaccgctggaaaacacttggtgggcggaacaggactcgccgttctgctttctggcgttctgctttgagtatgctggcgtcatcaatagtggtctgtcgtacaactgtagcttgcctctggcatttgatggtagttgctccggcctgcaacatttctcagcgatgttacgcgacgaaattggcggcaaagctgtgaatctcctcccatctgcggaataccaggatatttatcgtatcgtcagcgacaaagttaacgagatgctgaaacaagatctgattaacggtacctctaccaccgtggaaacggtgactgataagaagacaggcgaaattacccaacgcacgaaatacgggaccaaagttatggcacagtggtggttagaacacggtgtgaatcgtggcgtcacgaaacgctcggttatgactttggtgtatggggcgctggagtttggattccgcgatcaagtgctgggtgacaccgtccagaaagcgatcgataacggcaagggtgacatgtttctgaatccgaatcaggctgctggttacatggcgaaactgatctggaacgcagtgtccgggaccgtagtcgcagcagttgaggcgatgaactggctgaaaagtgcggcgaaattacttgctgctgaagtgaaggatcgtaagacggatacagttctgcgtggccgctgcgcagtacattgggtgactcccgacggcttccctgtgtggcaggaatacaagaagcctattcagacgcgcttgaacctgatgttcctcggtcagttccgcttacagcctaccattaacaccaacaaagatagcgagattgatgcacgcaaacagatgtctggtatcgctcctaactttgtacacagcctggacggtaaccaccttcgtatgactgtagtgtgggcacacgagaagtacggaatcgaatcttttgcactgattcacgactccttcggtaccattccggctgacgctgcgaacctgttcaaagcagtgcgcgaaactttcgttgacacatatgagtcttgtgatgtactggctgatttctacgaccagattgctgaccagttgcacgagtctcaacgcgacaaaatgccagcacttccggctaaaggtaacttgaacctccgtgacatcttaaaatcggacttcgcgttcgcg

SEQ ID NO: 1854 - protein, 890 aa, synthetic construct
  REGION 1..890: note = Variant of RNA polymerase
MHHHHHHMNTINIAKNDFSDIELAAIPFNTLADHYGERLAREQLALEHESYEMGEARFRKMFERQLKAGEVADNAAAKPLITTLLPKMIARINDWFEEVKAKRGKRPTAFQFLQEIKPEAVAYITIKTTLACLTSADNRTVQALASAIGRAIEDEARFGRIRDLEAKHFKKNVEEQLNKRVGHVYKKAFMQVVEHDMLSKGLLGGEAWSSWHKEDSIHVGVRCIEMLIESTGMVSLHRQNAGVVGQDSERIELAPEYAEAIATRAGALAGISPMFQPCVVPPKPWTGITGGGYWAAGRKPLQLVRTRSLAALRRYEEVSMPEVIKAVNIAQNTAWRINKKVLDVANTITQWKHCPVADIPAMDRGEMPARPLDIDTNEIALKAWKKEASAFYRKDKARVSRRLSMEFMLSQANKFANYEAIWFPQNMDWRGRVYAVPMFNPQGNDMTKGLLTFAQEKPIGEDGFYWLKIHGANTAGVDKVPFPQRIKFVEDNHTNIMECAKAPLENTWWAEQDSPFCFLAFCFEYAGVINSGLSYNCSLPLAFDGSCSGLQHFSAMLRDEIGGKAVNLLPSAEYQDIYRIVSDKVNEMLKQDLINGTSTTVETVTDKKTGEITQRTKYGTKVMAQWWLEHGVNRGVTKRSVMTLVYGALEFGFRDQVLGDTVQKAIDNGKGDMFLNPNQAAGYMAKLIWNAVSGTVVAAVEAMNWLKSAAKLLAAEVKDRKTDTVLRGRCAVHWVTPDGFPVWQEYKKPIQTRLNLMFLGQFRLQPTINTNKDSEIDARKQMSGIAPNFVHSLDGNHLRMTVVWAHEKYGIESFALIHDSFGTIPADAANLFKAVRETFVDTYESCDVLADFYDQIADQLHESQRDKMPALPAKGNLNLRDILKSDFAFA

SEQ ID NO: 1855 - DNA, 2670 bp, synthetic construct
  misc_feature 1..2670: note = Variant of RNA polymerase
  source 1..2670: mol_type = other DNA
atgcaccatcaccatcaccatatgaacacgattaacattgctaagaacgacttctctgacatcgaactggctgctatcccgttcaacactctggctgaccattacggtgagcgtttagctcgcgaacagttggcccttgagcatgagtcttacgagatgggtgaagcacgcttccgcaagatgtttgagcgtcaacttaaagctggtgaggttgcggataacgctgccgccaagcctctcatcactaccctactccctaagatgattgcacgcatcaacgactggtttgaggaagtgaaagccaagcgcggcaagcgcccgacagccttccagttcctgcaagaaatcaagccggaagccgtagcgtacatcaccattaagaccgtgctggctagcctaaccagtgcggacaatacaaccgttcaggctgtagcaagcgcaatcggtaaagccattgaggacgaggctcgcttcggtcgtatccgtgaccttgaagctaagcacttcaagaagaacgttgaggaacaactcaacaagcgcgtagggcacgtctacaagaaagcatttatgcaagttgtcgagcacgacatgctctctaagggtctactcgggggcgtggtatggccgtcgtggcataaggaagactctattcatgtaggagtacgctgcatcgagatgctcattgagtcaaccggaatggttctgttacaccgccaaaatgctggcgtagtaggtcaagactctgagcgtatcgaactcgcacctgaatacgctgaggctatcgcaacccgtgcaggtgcgctggctggcatctctccgatgttccaaccttgcgtagttcctcctaagccgtggactggcattactggtggtggctattgggctgcggggcgcaaacccctgcagttagtacgtactcgcagtctggcggcgcttcgccgctatgaagaagtgtcgatgccggaggtcatcaaagcagtcaacattgcgcagaatacagcatggcgtattaacaagaaagttctcgacgtagcgaataccatcacccaatggaaacactgtccagtccgcgatatccctgcgatggatcgtggcgaaatgccagctcgtccgttggacatcgataccaacgagattgcacttaaagcgtggaagaaagaagcttccgcgttctaccgcaaagacaaagcacgcgttagccgtcgtctgtcaatggagtttatgttatctcaggcgaacaagtttgcgaattatgaggcaatctggtttccgcaaaacatggattggcgtgggcgcgtgtacgctgtcccgatgttcaatcctcagggcaacgatatgacgaaaggcctgctgacctttgcgcaggagaaacccattggtgaagacggcttctattggctcaagattcatggcgcaaatacagctggagtggataaagtaccgtttccacaacgcatcaaatttgttgaggataaccatacgaatattatggaatgcgcgaaagcaccgctggaaaacacttggtgggcggaacaggactcgccgttctgctttctggcgttctgctttgagtatgctggcgtcatcaatagtggtctgtcgtacaactgtagcttgcctctggcattcgatggtagttgctccggcctgcaacatttctcagcgatgttacgcgacgaaattggcggcaaagctgtgaatctcctcccatctgcggaataccaggatatttatcgtatcgtcagcgacaaagttaacgagatgctgaaacaagatctgattaacggtacctctaccaccgtggaaacggtgactgataagaagacaggcgaaattacccaacgcacgaaatacgggaccaaagttatggcacagtggtggttagaacacggtgtgaatcgtggcgtcacgaaacgctcggttatgactttggtgtatggggcgctggagtttggattccgcgatcaagtgctgagtgacaccattcaaaaagcgatcgataacggcaagggtgacatgtttctgaatccgaatcaggctgctggttacatggcgaaactgatctggaacgcagtgtccgggaccgtagtcgcagcagttgaggcgatgaactggctgaaaagtgcggcgaaattacttgctgctgaagtgaaggatcgtaagacggatacagttctgcgtggccgctgcgcagtacattgggtgactcccgacggcttccctgtgtggcaggaatacaagaagcctattcagacgcgcttgaacctgatgttcctcggtcagttccgcttacagcctaccattaacaccaacaaagatagcgagattgatgtgcgcaaacaggtgtctggtatcgctcctaactttgtacacagcctggacggtaaccaccttcgtatgactgtagtgtgggcacacgagaagtacggaatcgaatcttttgcactgattcacgactccttcggtaccattccggctgacgctgcgaacctgttcaaagcagtgcgcgaaactttcgttgacacatatgagtcttgtgatgtactggctgatttctacgaccagattgctgaccagttgcacgagtctcaacgcgacaaaatgccagcacttccggctaaaggtaacttgaacctccgtgacatcttaaaatcggacttcgcgttcgcg

SEQ ID NO: 1856 - protein, 890 aa, synthetic construct
  REGION 1..890: note = Variant of RNA polymerase
MHHHHHHMNTINIAKNDFSDIELAAIPFNTLADHYGERLAREQLALEHESYEMGEARFRKMFERQLKAGEVADNAAAKPLITTLLPKMIARINDWFEEVKAKRGKRPTAFQFLQEIKPEAVAYITIKTVLASLTSADNTTVQAVASAIGKAIEDEARFGRIRDLEAKHFKKNVEEQLNKRVGHVYKKAFMQVVEHDMLSKGLLGGVVWPSWHKEDSIHVGVRCIEMLIESTGMVLLHRQNAGVVGQDSERIELAPEYAEAIATRAGALAGISPMFQPCVVPPKPWTGITGGGYWAAGRKPLQLVRTRSLAALRRYEEVSMPEVIKAVNIAQNTAWRINKKVLDVANTITQWKHCPVRDIPAMDRGEMPARPLDIDTNEIALKAWKKEASAFYRKDKARVSRRLSMEFMLSQANKFANYEAIWFPQNMDWRGRVYAVPMFNPQGNDMTKGLLTFAQEKPIGEDGFYWLKIHGANTAGVDKVPFPQRIKFVEDNHTNIMECAKAPLENTWWAEQDSPFCFLAFCFEYAGVINSGLSYNCSLPLAFDGSCSGLQHFSAMLRDEIGGKAVNLLPSAEYQDIYRIVSDKVNEMLKQDLINGTSTTVETVTDKKTGEITQRTKYGTKVMAQWWLEHGVNRGVTKRSVMTLVYGALEFGFRDQVLSDTIQKAIDNGKGDMFLNPNQAAGYMAKLIWNAVSGTVVAAVEAMNWLKSAAKLLAAEVKDRKTDTVLRGRCAVHWVTPDGFPVWQEYKKPIQTRLNLMFLGQFRLQPTINTNKDSEIDVRKQVSGIAPNFVHSLDGNHLRMTVVWAHEKYGIESFALIHDSFGTIPADAANLFKAVRETFVDTYESCDVLADFYDQIADQLHESQRDKMPALPAKGNLNLRDILKSDFAFA

SEQ ID NO: 1857 - DNA, 2670 bp, synthetic construct
  misc_feature 1..2670: note = Variant of RNA polymerase
  source 1..2670: mol_type = other DNA
atgcaccatcaccatcaccatatgaacacgattaacattgctaagaacgacttctctgacatcgaactggctgctatcccgttcaacactctggctgaccattacggtgagcgtttagctcgcgaacagttggcccttgagcatgagtcttacgagatgggtgaagcacgcttccgcaagatgtttgagcgtcaacttaaagctggtgaggttgcggataacgctgccgccaagcctctcatcactaccctactccctaagatgattgcacgcatcaacgactggtttgaggaagtgaaagctaagcgcggcaagcgcccgacagccttccagttcctgcaagaaatcaagccggaagccgtagcgtacatcaccattaagaccactctggcttgcctaaccagtgcggacaatacgactgttcaggctgtggcaagcgcaatcggtcgggccattgaggacgaggctcgcttcggtcgtatccgtgaccttgaagctaagcacttcaagaagaacgttgaggaacaactcaacaagcgcgtagggcacgtctacaagaaagcatttatgcaagttgtcgagcacgacatgctctctaagggtctactcggtggcggggcgtggtctcgctggcataaggaagactctattcatgtaggagtacgctgcatcgagatgctcattgagtcaaccggaatggttagcttacaccgccaaaatgctggcgtagtaggtcaagactctgagcgtatcgaactcgcacctgaatacgctgaggctatcgcaacccgtgcaggtgcgctggctggcatctctccgatgttccaaccttgcgtagttcctcctaagccgtggactggcattactggtggtggctattgggctgcggggcgcaaacccctgcagttagtacgtactcgcagtctggcggcgcttcgccgctatgaagaagtgtcgatgccggaggtcatcaaagcagtcaacattgcgcagaatacagcatggcgtattaacaagaaagttctcgacgtagcgaataccatcacccaatggaaacactgtccagtcgctgatatccctgcgatggatcgtggcgaaatgccagctcgtccgttggacatcgataccaacgagattgcacttaaagcgtggaagaaagaagcttccgcgttctaccgcaaagacaaagcacgcgttagccgtcgtctgtcaatggagtttatgttatctcaggcgaacaagtttgcgaattatgaggcaatctggtttccgcaaaacatggattggcgtgggcgcgtgtacgctgtcccgatgttcaatcctcagggcaacgatatgacgaaaggcctgctgacctttgcgcaggagaaacccattggtgaagacggcttctattggctcaagattcatggcgcaaatacagctggagtggataaagtaccgtttccacaacgcatcaaatttgttgaggataaccatacgaatattatggaatgcgcgaaagcaccgctggaaaacacttggtgggcggaacaggactcgccgttctgctttctggcgttctgctttgagtatgctggcgtcatcaatagtggtctgtcgtacaactgtagcttgcctctggcatttgatggtagttgctccggcctgcaacatttctcagcgatgttacgcgacgaaattggcggcaaagctgtgaatctcctcccatctgcggaataccaggatatttatcgtatcgtcagcgacaaagttaacgagatgctgaaacaagatctgattaacggtacctctaccaccgtggaaacggtgactgataagaagacaggcgaaattacccaacgcacgaaatacgggaccaaagttatggcacagtggtggttagaacacggtgtgactcgtggcgtcacgaaacgctcggttatgactttggtgtatggggcgctggagtttggattccgcgatcaagtgctgagtgacaccatccagaaagcgatcgataacggcaagggtgacatgtttctgaatccgaatcaggctgctggttacatggcgaaactgatctggaacgcagtgtccgggaccgtagtcgcagcagttgaggcgatgaactggctgaaaagtgcggcgaaattacttgctgctgaagtgaaggatcgtaagacggatacagttctgcgtggccgctgcgcagtacattgggtgactcccgacggcttccctgtgtggcaggaatacaagaagcctattcagacgcgcttgaacctgatgttcctcggtcagttccgcttacagcctaccattaacaccaacaaagatagcgagattgatgcacgcaaacaggtgtctggtatcgctcctaactttgtacacagcctggacgcgaaccaccttcgtatgactgtagtgtgggcacacgagaagtacggaatcgaatcttttgcactgattcacgactccttcggtaccattccggctgacgctgcgaacctgttcaaagcagtgcgcgaaactttcgttgacacatatgagtcttgtgatgtactggctgatttctacgaccagattgctgaccagttgcacgagtctcaacgcgacaaaatgccagcacttccggctaaaggtaacttgaacctccgtgacatcttaaaatcggacttcgcgttcgcg

SEQ ID NO: 1858 - protein, 890 aa, synthetic construct
  REGION 1..890: note = Variant of RNA polymerase
MHHHHHHMNTINIAKNDFSDIELAAIPFNTLADHYGERLAREQLALEHESYEMGEARFRKMFERQLKAGEVADNAAAKPLITTLLPKMIARINDWFEEVKAKRGKRPTAFQFLQEIKPEAVAYITIKTTLACLTSADNTTVQAVASAIGRAIEDEARFGRIRDLEAKHFKKNVEEQLNKRVGHVYKKAFMQVVEHDMLSKGLLGGGAWSRWHKEDSIHVGVRCIEMLIESTGMVSLHRQNAGVVGQDSERIELAPEYAEAIATRAGALAGISPMFQPCVVPPKPWTGITGGGYWAAGRKPLQLVRTRSLAALRRYEEVSMPEVIKAVNIAQNTAWRINKKVLDVANTITQWKHCPVADIPAMDRGEMPARPLDIDTNEIALKAWKKEASAFYRKDKARVSRRLSMEFMLSQANKFANYEAIWFPQNMDWRGRVYAVPMFNPQGNDMTKGLLTFAQEKPIGEDGFYWLKIHGANTAGVDKVPFPQRIKFVEDNHTNIMECAKAPLENTWWAEQDSPFCFLAFCFEYAGVINSGLSYNCSLPLAFDGSCSGLQHFSAMLRDEIGGKAVNLLPSAEYQDIYRIVSDKVNEMLKQDLINGTSTTVETVTDKKTGEITQRTKYGTKVMAQWWLEHGVTRGVTKRSVMTLVYGALEFGFRDQVLSDTIQKAIDNGKGDMFLNPNQAAGYMAKLIWNAVSGTVVAAVEAMNWLKSAAKLLAAEVKDRKTDTVLRGRCAVHWVTPDGFPVWQEYKKPIQTRLNLMFLGQFRLQPTINTNKDSEIDARKQVSGIAPNFVHSLDANHLRMTVVWAHEKYGIESFALIHDSFGTIPADAANLFKAVRETFVDTYESCDVLADFYDQIADQLHESQRDKMPALPAKGNLNLRDILKSDFAFA

SEQ ID NO: 1859 - DNA, 2670 bp, synthetic construct
  misc_feature 1..2670: note = Variant of RNA polymerase
  source 1..2670: mol_type = other DNA
atgcaccatcaccatcaccatatgaacacgattaacattgctaagaacgacttctctgacatcgaactggctgctatcccgttcaacactctggctgaccattacggtgagcgtttagctcgcgaacagttggcccttgagcatgagtcttacgagatgggtgaagcacgcttccgcaagatgtttgagcgtcaacttaaagctggtgaggttgcggataacgctgccgccaagcctctcatcactaccctactccctaagatgattgcacgcatcaacgactggtttgaggaagtgaaagccaagcgcggcaagcgcccgacagccttccagttcctgcaagaaatcaagccggaagccgtagcgtacatcaccattaagaccactctggcttgcctaaccagtgcggacaatacaaccgttcaggctgtagcaagcgcaatcggtcgggccattgaggacgaggctcgcttcggtcgtatccgtgaccttgaagctaagcacttcaagaagaacgttgaggaacaactcaacaagcgcgtagggcacgtctacaagaaagcatttatgcaagttgtcgagcacgacatgctctctaagggtctactcggtggcgaggcgtggtcttcgtggcataaggaagactctattcatgtaggagtacgctgcatcgagatgctcattgagtcaaccggaatggttagcttacaccgccaaaatgctggcgtagtaggtcaagactctgagcgtatcgaactcgcacctgaatacgctgaggctatcgcaacccgtgcaggtgcgctggctggcatctctccgatgttccaaccttgcgtagttcctcctaagccgtggactggcattactggtggtggctattgggctgcggggcgcaaacccctgcagttagtacgtactcgcagtctggcggcgcttcgccgctatgaagaagtgtcgatgccggaggtcatcaaagcagtcaacattgcgcagaatacagcatggcgtattaacaagaaagttctcgacgtagcgaataccatcacccaatggaaacactgtccagtcgctgatatccctgcgatggatcgtggcgaaatgccagctcgtccgttggacatcgataccaacgagattgcacttaaagcgtggaagaaagaagcttccgcgttctaccgcaaagacaaagcacgcgttagccgtcgtctgtcaatggagtttatgttatctcaggcgaacaagtttgcgaattatgaggcaatctggtttccgcaaaacatggattggcgtgggcgcgtgtacgctgtcccgatgttcaatcctcagggcaacgatatgacgaaaggcctgctgacctttgcgcaggagaaacccattggtgaagacggcttctattggctcaagattcatggcgcaaatacagctggagtggataaagtaccgtttccacaacgcatcaaatttgttgaggataaccatacgaatattatggaatgcgcgaaagcaccgctggaaaacacttggtgggcggaacaggactcgccgttctgctttctggcgttctgctttgagtatgctggcgtcatcaatagtggtctgtcgtacaactgtagcttgcctctggcatttgatggtagttgctccggcctgcaacatttctcagcgatgttacgcgacgaaattggcggcaaagctgtgaatctcctcccatctgcggaataccaggatatttatcgtatcgtcagcgacaaagttaacgagatgctgaaacaagatctgattaacggtacctctaccaccgtggaaacggtgactgataagaagacaggcgaaattacccaacgcacgaaatacgggaccaaagttatggcacagtggtggttagaacacggtgtgaatcgtggcgtcacgaaacgctcggttatgactttggtgtatggggcgctggagtttggattccgcgatcaagtgctgagtgacaccattcaaaaagcgatcgataacggcaagggtgacatgtttctgaatccgaatcaggctgctggttacatggcgaaactgatctggaacgcagtgtccgggaccgtagtcgcagcagttgaggcgatgaactggctgaaaagtgcggcgaaattacttgctgctgaagtgaaggatcgtaagacggatacagttctgcgtggccgctgcgcagtacattgggtgactcccgacggcttccctgtgtggcaggaatacaagaagcctattcagacgcgcttgaacctgatgttcctcggtcagttccgcttacagcctaccattaacaccaacaaagatagcgagattgatgtgcgcaaacaggtgtctggtatcgctcctaactttgtacacagcctggacggtaaccaccttcgtatgactgtagtgtgggcacacgagaagtacggaatcgaatcttttgcactgattcacgactccttcggtaccattccggctgacgctgcgaacctgttcaaagcagtgcgcgaaactttcgttgacacatatgagtcttgtgatgtactggctgatttctacgaccagattgctgaccagttgcacgagtctcaacgcgacaaaatgccagcacttccggctaaaggtaacttgaacctccgtgacatcttaaaatcggacttcgcgttcgcg

SEQ ID NO: 1860 - protein, 890 aa, synthetic construct
  REGION 1..890: note = Variant of RNA polymerase
MHHHHHHMNTINIAKNDFSDIELAAIPFNTLADHYGERLAREQLALEHESYEMGEARFRKMFERQLKAGEVADNAAAKPLITTLLPKMIARINDWFEEVKAKRGKRPTAFQFLQEIKPEAVAYITIKTTLACLTSADNTTVQAVASAIGRAIEDEARFGRIRDLEAKHFKKNVEEQLNKRVGHVYKKAFMQVVEHDMLSKGLLGGEAWSSWHKEDSIHVGVRCIEMLIESTGMVSLHRQNAGVVGQDSERIELAPEYAEAIATRAGALAGISPMFQPCVVPPKPWTGITGGGYWAAGRKPLQLVRTRSLAALRRYEEVSMPEVIKAVNIAQNTAWRINKKVLDVANTITQWKHCPVADIPAMDRGEMPARPLDIDTNEIALKAWKKEASAFYRKDKARVSRRLSMEFMLSQANKFANYEAIWFPQNMDWRGRVYAVPMFNPQGNDMTKGLLTFAQEKPIGEDGFYWLKIHGANTAGVDKVPFPQRIKFVEDNHTNIMECAKAPLENTWWAEQDSPFCFLAFCFEYAGVINSGLSYNCSLPLAFDGSCSGLQHFSAMLRDEIGGKAVNLLPSAEYQDIYRIVSDKVNEMLKQDLINGTSTTVETVTDKKTGEITQRTKYGTKVMAQWWLEHGVNRGVTKRSVMTLVYGALEFGFRDQVLSDTIQKAIDNGKGDMFLNPNQAAGYMAKLIWNAVSGTVVAAVEAMNWLKSAAKLLAAEVKDRKTDTVLRGRCAVHWVTPDGFPVWQEYKKPIQTRLNLMFLGQFRLQPTINTNKDSEIDVRKQVSGIAPNFVHSLDGNHLRMTVVWAHEKYGIESFALIHDSFGTIPADAANLFKAVRETFVDTYESCDVLADFYDQIADQLHESQRDKMPALPAKGNLNLRDILKSDFAFA

SEQ ID NO: 1861 - DNA, 2670 bp, synthetic construct
  misc_feature 1..2670: note = Variant of RNA polymerase
  source 1..2670: mol_type = other DNA
atgcaccatcaccatcaccatatgaacacgattaacattgctaagaacgacttctctgacatcgaactggctgctatcccgttcaacactctggctgaccattacggtgagcgtttagctcgcgaacagttggcccttgagcatgagtcttacgagatgggtgaagcacgcttccgcaagatgtttgagcgtcaacttaaagctggtgaggttgcggataacgctgccgccaagcctctcatcactaccctactccctaagatgattgcacgcatcaacgactggtttgaggaagtgaaagctaagcgcggcaagcgcccgacagccttccagttcctgcaagaaatcaagccggaagccgtagcgtacatcaccattaagaccactctggcttgcctaaccagtgcggacaatacaaccgttcaggctgtagcaagcgcaatcggtcgggccattgaggacgaggctcgcttcggtcgtatccgtgaccttgaagctaagcacttcaagaagaacgttgaggaacaactcaacaagcgcgtagggcacgtctacaagaaagcatttatgcaagttgtcgagcacgacatgctctctaagggtctactcggtggcgaggcgtggtcttcgtggcataaggaagactctattcatgtaggagtacgctgcatcgagatgctcattgagtcaaccggaatggttagcttacaccgccaaaatgctggcgtagtaggtcaagactctgagcgtatcgaactcgcacctgaatacgctgaggctatcgcaacccgtgcaggtgcgctggctggcatctctccgatgttccaaccttgcgtagttcctcctaagccgtggactggcattactggtggtggctattgggctgcggggcgcaaacccctgcagttagtacgtactcgcagtctggcggcgcttcgccgctatgaagaagtgtcgatgccggaggtcatcaaagcagtcaacattgcgcagaatacagcatggcgtattaacaagaaagttctcgacgtagcgaataccatcacccaatggaaacactgtccagtcgctgatatccctgcgatggatcgtggcgaaatgccagctcgtccgttggacatcgataccaacgagattgcacttaaagcgtggaagaaagaagcttccgcgttctaccgcaaagacaaagcacgcgttagccgtcgtctgtcaatggagtttatgttatctcaggcgaacaagtttgcgaattatgaggcaatctggtttccgcaaaacatggattggcgtgggcgcgtgtacgctgtcccgatgttcaatcctcagggcaacgatatgacgaaaggcctgctgacctttgcgcaggagaaacccattggtgaagacggcttctattggctcaagattcatggcgcaaatacagctggagtggataaagtaccgtttccacaacgcatcaaatttgttgaggataaccatacgaatattatggaatgcgcgaaagcaccgctggaaaacacttggtgggcggaacaggactcgccgttctgctttctggcgttctgctttgagtatgctggcgtcatcaatagtggtctgtcgtacaactgtagcttgcctctggcatttgatggtagttgctccggcctgcaacatttctcagcgatgttacgcgacgaaattggcggcaaagctgtgaatctcctcccatctgcggaataccaggatatttatcgtatcgtcagcgacaaagttaacgagatgctgaaacaagatctgattaacggtacctctaccaccgtggaaacggtgactgataagaagacaggcgaaattacccaacgcacgaaatacgggaccaaagttatggcacagtggtggttagaacacggtgtgaatcgtggcgtcacgaaacgctcggttatgactttggtgtatggggcgctggagtttggattccgcgatcaagtgctgagtgacaccgtcgggaaagcgatcgataacggcaagggtgacatgtttctgaatccgaatcaggctgctggttacatggcgaaactgatctggaacgcagtgtccgggaccgtagtcgcagcagttgaggcgatgaactggctgaaaagtgcggcgaaattacttgctgctgaagtgaaggatcgtaagacggatacagttctgcgtggccgctgcgcagtacattgggtgactcccgacggcttccctgtgtggcaggaatacaagaagcctattcagacgcgcttgaacctgatgttcctcggtcagttccgcttacagcctaccattaacaccaacaaagatagcgagattgatgcacgcaaacagatgtctggtatcgctcctaactttgtacacagcctggacggtaaccaccttcgtatgactgtagtgtgggcacacgagaagtacggaatcgaatcttttgcactgattcacgactccttcggtaccattccggctgacgctgcgaacctgttcaaagcagtgcgcgaaactttcgttgacacatatgagtcttgtgatgtactggctgatttctacgaccagattgctgaccagttgcacgagtctcaacgcgacaaaatgccagcacttccggctaaaggtaacttgaacctccgtgacatcttaaaatcggacttcgcgttcgcg

SEQ ID NO: 1862 - protein, 890 aa, synthetic construct
  REGION 1..890: note = Variant of RNA polymerase
MHHHHHHMNTINIAKNDFSDIELAAIPFNTLADHYGERLAREQLALEHESYEMGEARFRKMFERQLKAGEVADNAAAKPLITTLLPKMIARINDWFEEVKAKRGKRPTAFQFLQEIKPEAVAYITIKTTLACLTSADNTTVQAVASAIGRAIEDEARFGRIRDLEAKHFKKNVEEQLNKRVGHVYKKAFMQVVEHDMLSKGLLGGEAWSSWHKEDSIHVGVRCIEMLIESTGMVSLHRQNAGVVGQDSERIELAPEYAEAIATRAGALAGISPMFQPCVVPPKPWTGITGGGYWAAGRKPLQLVRTRSLAALRRYEEVSMPEVIKAVNIAQNTAWRINKKVLDVANTITQWKHCPVADIPAMDRGEMPARPLDIDTNEIALKAWKKEASAFYRKDKARVSRRLSMEFMLSQANKFANYEAIWFPQNMDWRGRVYAVPMFNPQGNDMTKGLLTFAQEKPIGEDGFYWLKIHGANTAGVDKVPFPQRIKFVEDNHTNIMECAKAPLENTWWAEQDSPFCFLAFCFEYAGVINSGLSYNCSLPLAFDGSCSGLQHFSAMLRDEIGGKAVNLLPSAEYQDIYRIVSDKVNEMLKQDLINGTSTTVETVTDKKTGEITQRTKYGTKVMAQWWLEHGVNRGVTKRSVMTLVYGALEFGFRDQVLSDTVGKAIDNGKGDMFLNPNQAAGYMAKLIWNAVSGTVVAAVEAMNWLKSAAKLLAAEVKDRKTDTVLRGRCAVHWVTPDGFPVWQEYKKPIQTRLNLMFLGQFRLQPTINTNKDSEIDARKQMSGIAPNFVHSLDGNHLRMTVVWAHEKYGIESFALIHDSFGTIPADAANLFKAVRETFVDTYESCDVLADFYDQIADQLHESQRDKMPALPAKGNLNLRDILKSDFAFA

SEQ ID NO: 1863 - DNA, 2670 bp, synthetic construct
  misc_feature 1..2670: note = Variant of RNA polymerase
  source 1..2670: mol_type = other DNA
atgcaccatcaccatcaccatatgaacacgattaacattgctaagaacgacttctctgacatcgaactggctgctatcccgttcaacactctggctgaccattacggtgagcgtttagctcgcgaacagttggcccttgagcatgagtcttacgagatgggtgaagcacgcttccgcaagatgtttgagcgtcaacttaaagctggtgaggttgcggataacgctgccgccaagcctctcatcactaccctactccctaagatgattgcacgcatcaacgactggtttgaggaagtgaaagccaagcgcggcaagcgcccgacagccttccagttcctgcaagaaatcaagccggaagccgtagcgtacatcaccattaagaccactctggctgtcctaaccagtgcggacaatacaaccgttcaggctgtagcaagcgcaatcggtcgcgccattgaggacgaggctcgcttcggtcgtatccgtgaccttgaagctaagcacttcaagaagaacgttgaggaacaactcaacaagcgcgtagggcacgtctacaagaaagcatttatgcaagttgtcgagcacgacatgctctctaagggtctactcgggggcgtggtatgggaatcgtggcataaggaagactctattcatgtaggagtacgctgcatcgagatgctcattgagtcaaccggaatggttagcttacaccgccaaaatgctggcgtagtaggtcaagactctgagcgtatcgaactcgcacctgaatacgctgaggctatcgcaacccgtgcaggtgcgctggctggcatctctccgatgttccaaccttgcgtagttcctcctaagccgtggactggcattactggtggtggctattgggctgcggggcgcaaacccctgcagttagtacgtactcgcagtctggcggcgcttcgccgctatgaagaagtgtcgatgccggaggtcatcaaagcagtcaacattgcgcagaatacagcatggcgtattaacaagaaagttctcgacgtagcgaataccatcacccaatggaaacactgtccagtccgcgatatccctgcgatggatcgtggcgaaatgccagctcgtccgttggacatcgataccaacgagattgcacttaaagcgtggaagaaagaagcttccgcgttctaccgcaaagacaaagcacgcgttagccgtcgtctgtcaatggagtttatgttatctcaggcgaacaagtttgcgaattatgaggcaatctggtttccgtggaacatggattggcgtgggcgcgtgtacgctgtcccgatgttcaatcctcagggcaacgatatgacgaaaggcctgctgacctttgcgcaggagaaacccattggtgaagacggcttctattggctcaagattcatggcgcaaatacagctggagtggataaagtaccgtttccacaacgcatcaaatttgttgaggataaccatacgaatattatggaatgcgcgaaagcaccgctggaaaacacttggtgggcggaacaggactcgccgttctgctttctggcgttctgctttgagtatgctggcgtcatcaatagtggtctgtcgtacaactgtagcttgcctatggcattcgatggtagttgctccggcctgcaacatttctcagcgatgttacgcgacgaaattggcggcaaagctgtgaatctcctcccatctgcggaataccaggatatttatcgtatcgtcagcgacaaagttaacgagatgctgaaacaagatctgattaacggtacctctaccaccgtggaaacggtgactgataagaagacaggcgaaattacccaacgcacgaaatacgggaccaaagttatggcacagtggtggttagaacacggtgtgaatcgtggcgtcacgaaacgctcggttatgactttggtgtatggggcgctggagtttggattccgcgatcaagtgctgagtgacaccattcaaaaagcgatcgataacggcaagggtgacatgtttctgaatccgaatcaggctgctggttacatggcgaaactgatctggaacgcagtgtccgggaccgtagtcgcagcagttgaggcgatgaactggctgaaaagtgcggcgaaattacttgctgctgaagtgaaggatcgtaagacggatacagttctgcgtggccgctgcgcagtacattgggtgactcccgacggcttccctgtgtggcaggaatacaagaagcctattcagacgcgcttgaacctgatgttcctcggtcagttccgcttacagcctaccattaacaccaacaaagatagcgagattgatgtgcgcaaacaggtgtctggtatcgctcctaactttgtacacagcctggacggtaaccaccttcgtatgactgtagtgtgggcacacgagaagtacggaatcgaatcttttgcactgattcacgactccttcggtaccattccggctgacgctgcgaacctgttcaaagcagtgcgcgaaactttcgttgacacatatgagtcttgtgatgtactggctgatttctacgaccagattgctgaccagttgcacgagtctcaacgcgacaaaatgccagcacttccggctaaaggtaacttgaacctccgtgacatcttaaaatcggacttcgcgttcgcg

SEQ ID NO: 1864 - protein, 890 aa, synthetic construct
  REGION 1..890: note = Variant of RNA polymerase
MHHHHHHMNTINIAKNDFSDIELAAIPFNTLADHYGERLAREQLALEHESYEMGEARFRKMFERQLKAGEVADNAAAKPLITTLLPKMIARINDWFEEVKAKRGKRPTAFQFLQEIKPEAVAYITIKTTLAVLTSADNTTVQAVASAIGRAIEDEARFGRIRDLEAKHFKKNVEEQLNKRVGHVYKKAFMQVVEHDMLSKGLLGGVVWESWHKEDSIHVGVRCIEMLIESTGMVSLHRQNAGVVGQDSERIELAPEYAEAIATRAGALAGISPMFQPCVVPPKPWTGITGGGYWAAGRKPLQLVRTRSLAALRRYEEVSMPEVIKAVNIAQNTAWRINKKVLDVANTITQWKHCPVRDIPAMDRGEMPARPLDIDTNEIALKAWKKEASAFYRKDKARVSRRLSMEFMLSQANKFANYEAIWFPWNMDWRGRVYAVPMFNPQGNDMTKGLLTFAQEKPIGEDGFYWLKIHGANTAGVDKVPFPQRIKFVEDNHTNIMECAKAPLENTWWAEQDSPFCFLAFCFEYAGVINSGLSYNCSLPMAFDGSCSGLQHFSAMLRDEIGGKAVNLLPSAEYQDIYRIVSDKVNEMLKQDLINGTSTTVETVTDKKTGEITQRTKYGTKVMAQWWLEHGVNRGVTKRSVMTLVYGALEFGFRDQVLSDTIQKAIDNGKGDMFLNPNQAAGYMAKLIWNAVSGTVVAAVEAMNWLKSAAKLLAAEVKDRKTDTVLRGRCAVHWVTPDGFPVWQEYKKPIQTRLNLMFLGQFRLQPTINTNKDSEIDVRKQVSGIAPNFVHSLDGNHLRMTVVWAHEKYGIESFALIHDSFGTIPADAANLFKAVRETFVDTYESCDVLADFYDQIADQLHESQRDKMPALPAKGNLNLRDILKSDFAFA

SEQ ID NO: 1865 - DNA, 2670 bp, synthetic construct
  misc_feature 1..2670: note = Variant of RNA polymerase
  source 1..2670: mol_type = other DNA
atgcaccatcaccatcaccatatgaacacgattaacattgctaagaacgacttctctgacatcgaactggctgctatcccgttcaacactctggctgaccattacggtgagcgtttagctcgcgaacagttggcccttgagcatgagtcttacgagatgggtgaagcacgcttccgcaagatgtttgagcgtcaacttaaagctggtgaggttgcggataacgctgccgccaagcctctcatcactaccctactccctaagatgattgcacgcatcaacgactggtttgaggaagtgaaagccaagcgcggcaagcgcccgacagccttccagttcctgcaagaaatcaagccggaagccgtagcgtacatcaccattaagaccgtgctggctatcctaaccagtgcggacaatacaaccgttcaggctgtagcaagcgcaatcggtcgggccattgaggacgaggctcgcttcggtcgtatccgtgaccttgaagctaagcacttcaagaagaacgttgaggaacaactcaacaagcgcgtagggcacgtctacaagaaagcatttatgcaagttgtcgagcacgacatgctctctaagggtctactcgggggcgaggtatggtcgtcgtggcataaggaagactctattcatgtaggagtacgctgcatcgagatgctcattgagtcaaccggaatggttctgttacaccgccaaaatgctggcgtagtaggtcaagactctgagcgtatcgaactcgcacctgaatacgctgaggctatcgcaacccgtgcaggtgcgctggctggcatctctccgatgttccaaccttgcgtagttcctcctaagccgtggactggcattactggtggtggctattgggctgcggggcgcaaacccctgcagttagtacgtactcgcagtctggcggcgcttcgccgctatgaagaagtgtcgatgccggaggtcatcaaagcagtcaacattgcgcagaatacagcatggcgtattaacaagaaagttctcgacgtagcgaataccatcacccaatggaaacactgtccagtcgcagatatccctgcgatggatcgtggcgaaatgccagctcgtccgttggacatcgataccaacgagattgcacttaaagcgtggaagaaagaagcttccgcgttctaccgcaaagacaaagcacgcgttagccgtcgtctgtcaatggagtttatgttatctcaggcgaacaagtttgcgaattatgaggcaatctggtttccgtggaacatggattggcgtgggcgcgtgtacgctgtcccgatgttcaatcctcagggcaacgatatgacgaaaggcctgctgacctttgcgcaggagaaacccattggtgaagacggcttctattggctcaagattcatggcgcaaatacagctggagtggataaagtaccgtttccacaacgcatcaaatttgttgaggataaccatacgaatattatggaatgcgcgaaagcaccgctggaaaacacttggtgggcggaacaggactcgccgttctgctttctggcgttctgctttgagtatgctggcgtcatcaatagtggtctgtcgtacaactgtagcttgcctctggcattcgatggtagttgctccggcctgcaacatttctcagcgatgttacgcgacgaaattggcggcaaagctgtgaatctcctcccatctgcggaataccaggatatttatcgtatcgtcagcgacaaagttaacgagatgctgaaacaagatctgattaacggtacctctaccaccgtggaaacggtgactgataagaagacaggcgaaattacccaacgcacgaaatacgggaccaaagttatggcacagtggtggttagaacacggtgtgaatcgtggcgtcacgaaacgctcggttatgactttggtgtatggggcgctggagtttggattccgcgatcaagtgctgagtgacaccattcaaaaagcgatcgataacggcaagggtgacatgtttctgaatccgaatcaggctgctggttacatggcgaaactgatctggaacgcagtgtccgggaccgtagtcgcagcagttgaggcgatgaactggctgaaaagtgcggcgaaattacttgctgctgaagtgaaggatcgtaagacggatacagttctgcgtggccgctgcgcagtacattgggtgactcccgacggcttccctgtgtggcaggaatacaagaagcctattcagacgcgcttgaacctgatgttcctcggtcagttccgcttacagcctaccattaacaccaacaaagatagcgagattgatgtgcgcaaacaggtgtctggtatcgctcctaactttgtacacagcctggacggtaaccaccttcgtatgactgtagtgtgggcacacgagaagtacggaatcgaatcttttgcactgattcacgactccttcggtaccattccggctgacgctgcgaacctgttcaaagcagtgcgcgaaactttcgttgacacatatgagtcttgtgatgtactggctgatttctacgaccagattgctgaccagttgcacgagtctcaacgcgacaaaatgccagcacttccggctaaaggtaacttgaacctccgtgacatcttaaaatcggacttcgcgttcgcg

SEQ ID NO: 1866 - protein, 890 aa, synthetic construct
  REGION 1..890: note = Variant of RNA polymerase
MHHHHHHMNTINIAKNDFSDIELAAIPFNTLADHYGERLAREQLALEHESYEMGEARFRKMFERQLKAGEVADNAAAKPLITTLLPKMIARINDWFEEVKAKRGKRPTAFQFLQEIKPEAVAYITIKTVLAILTSADNTTVQAVASAIGRAIEDEARFGRIRDLEAKHFKKNVEEQLNKRVGHVYKKAFMQVVEHDMLSKGLLGGEVWSSWHKEDSIHVGVRCIEMLIESTGMVLLHRQNAGVVGQDSERIELAPEYAEAIATRAGALAGISPMFQPCVVPPKPWTGITGGGYWAAGRKPLQLVRTRSLAALRRYEEVSMPEVIKAVNIAQNTAWRINKKVLDVANTITQWKHCPVADIPAMDRGEMPARPLDIDTNEIALKAWKKEASAFYRKDKARVSRRLSMEFMLSQANKFANYEAIWFPWNMDWRGRVYAVPMFNPQGNDMTKGLLTFAQEKPIGEDGFYWLKIHGANTAGVDKVPFPQRIKFVEDNHTNIMECAKAPLENTWWAEQDSPFCFLAFCFEYAGVINSGLSYNCSLPLAFDGSCSGLQHFSAMLRDEIGGKAVNLLPSAEYQDIYRIVSDKVNEMLKQDLINGTSTTVETVTDKKTGEITQRTKYGTKVMAQWWLEHGVNRGVTKRSVMTLVYGALEFGFRDQVLSDTIQKAIDNGKGDMFLNPNQAAGYMAKLIWNAVSGTVVAAVEAMNWLKSAAKLLAAEVKDRKTDTVLRGRCAVHWVTPDGFPVWQEYKKPIQTRLNLMFLGQFRLQPTINTNKDSEIDVRKQVSGIAPNFVHSLDGNHLRMTVVWAHEKYGIESFALIHDSFGTIPADAANLFKAVRETFVDTYESCDVLADFYDQIADQLHESQRDKMPALPAKGNLNLRDILKSDFAFA

SEQ ID NO: 1867 - DNA, 2670 bp, synthetic construct
  misc_feature 1..2670: note = Variant of RNA polymerase
  source 1..2670: mol_type = other DNA
atgcaccatcaccatcaccatatgaacacgattaacattgctaagaacgacttctctgacatcgaactggctgctatcccgttcaacactctggctgaccattacggtgagcgtttagctcgcgaacagttggcccttgagcatgagtcttacgagatgggtgaagcacgcttccgcaagatgtttgagcgtcaacttaaagctggtgaggttgcggataacgctgccgccaagcctctcatcactaccctactccctaagatgattgcacgcatcaacgactggtttgaggaagtgaaagccaagcgcggcaagcgcccgacagccttccagttcctgcaagaaatcaagccggaagccgtagcgtacatcaccattaagaccactctggctatcctaaccagtgcggacaatacaaccgttcaggctgtagcaagcgcaatcggtaaagccattgaggacgaggctcgcttcggtcgtatccgtgaccttgaagctaagcacttcaagaagaacgttgaggaacaactcaacaagcgcgtagggcacgtctacaagaaagcatttatgcaagttgtcgagcacgacatgctctctaagggtctactcgggggcggggcatggtcgtcgtggcataaggaagactctattcatgtaggagtacgctgcatcgagatgctcattgagtcaaccggaatggttagtttacaccgccaaaatgctggcgtagtaggtcaagactctgagcgtatcgaactcgcacctgaatacgctgaggctatcgcaacccgtgcaggtgcgctggctggcatctctccgatgttccaaccttgcgtagttcctcctaagccgtggactggcattactggtggtggctattgggctgcggggcgcaaacccctgcagttagtacgtactcgcagtctggcggcacttcgccgctatgaagaagtgtcgatgccggaggtcatcaaagcagtcaacattgcgcagaatacagcatggcgtattaacaagaaagttctcgacgtagcgaataccatcacccaatggaaacactgtccagtcgcagatatccctgcgatggatcgtggcgaaatgccagctcgtccgttggacatcgataccaacgagattgcacttaaagcgtggaagaaagaagcttccgcgttctaccgcaaagacaaagcacgcgttagccgtcgtctgtcaatggagtttatgttatctcaggcgaacaagtttgcgaattatgaggcaatctggtttccgcaaaacatggattggcgtgggcgcgtgtacgctgtcccgatgttcaatcctcagggcaacgatatgacgaaaggcctgctgacctttgcgcaggagaaacccattggtgaagacggcttctattggctcaagattcatggcgcaaatacagctggagtggataaagtaccgtttccacaacgcatcaaatttgttgaggataaccatacgaatattatggaatgcgcgaaagcaccgctggaaaacacttggtgggcggaacaggactcgccgttctgctttctggcgttctgctttgagtatgctggcgtcatcaatagtggtctgtcgtacaactgtagcttgcctctggcattcgatggtagttgctccggcctgcaacatttctcagcgatgttacgcgacgaaattggcggcaaagctgtgaatctcctcccatctgcggaataccaggatatttatcgtatcgtcagcgacaaagttaacgagatgctgaaacaagatctgattaacggtacctctaccaccgtggaaacggtgactgataagaagacaggcgaaattacccaacgcacgaaatacgggaccaaagttatggcacagtggtggttagaacacggtgtgaatcgtggcgtcacgaaacgctcggttatgactttggtgtatggggcgctggagtttggattccgcgatcaagtgctgagtgacaccattcaaaaagcgatcgataacggcaagggtgacatgtttctgaatccgaatcaggctgctggttacatggcgaaactgatctggaacgcagtgtccgggaccgtagtcgcagcagttgaggcgatgaactggctgaaaagtgcggcgaaattacttgctgctgaagtgaaggatcgtaagacggatacagttctgcgtggccgctgcgcagtacattgggtgactcccgacggcttccctgtgtggcaggaatacaagaagcctattcagacgcgcttgaacctgatgttcctcggtcagttccgcttacagcctaccattaacaccaacaaagatagcgagattgatgcgcgcaaacaggtgtctggtatcgctcctaactttgtacacagcctggacggtaaccaccttcgtatgactgtagtgtgggcacacgagaagtacggaatcgaatcttttgcactgattcacgactccttcggtaccattccggctgacgctgcgaacctgttcaaagcagtgcgcgaaactttcgttgacacatatgagtcttgtgatgtactggctgatttctacgaccagattgctgaccagttgcacgagtctcaacgcgacaaaatgccagcacttccggctaaaggtaacttgaacctccgtgacatcttaaaatcggacttcgcgttcgcg

SEQ ID NO: 1868 - protein, 890 aa, synthetic construct
  REGION 1..890: note = Variant of RNA polymerase
MHHHHHHMNTINIAKNDFSDIELAAIPFNTLADHYGERLAREQLALEHESYEMGEARFRKMFERQLKAGEVADNAAAKPLITTLLPKMIARINDWFEEVKAKRGKRPTAFQFLQEIKPEAVAYITIKTTLAILTSADNTTVQAVASAIGKAIEDEARFGRIRDLEAKHFKKNVEEQLNKRVGHVYKKAFMQVVEHDMLSKGLLGGGAWSSWHKEDSIHVGVRCIEMLIESTGMVSLHRQNAGVVGQDSERIELAPEYAEAIATRAGALAGISPMFQPCVVPPKPWTGITGGGYWAAGRKPLQLVRTRSLAALRRYEEVSMPEVIKAVNIAQNTAWRINKKVLDVANTITQWKHCPVADIPAMDRGEMPARPLDIDTNEIALKAWKKEASAFYRKDKARVSRRLSMEFMLSQANKFANYEAIWFPQNMDWRGRVYAVPMFNPQGNDMTKGLLTFAQEKPIGEDGFYWLKIHGANTAGVDKVPFPQRIKFVEDNHTNIMECAKAPLENTWWAEQDSPFCFLAFCFEYAGVINSGLSYNCSLPLAFDGSCSGLQHFSAMLRDEIGGKAVNLLPSAEYQDIYRIVSDKVNEMLKQDLINGTSTTVETVTDKKTGEITQRTKYGTKVMAQWWLEHGVNRGVTKRSVMTLVYGALEFGFRDQVLSDTIQKAIDNGKGDMFLNPNQAAGYMAKLIWNAVSGTVVAAVEAMNWLKSAAKLLAAEVKDRKTDTVLRGRCAVHWVTPDGFPVWQEYKKPIQTRLNLMFLGQFRLQPTINTNKDSEIDARKQVSGIAPNFVHSLDGNHLRMTVVWAHEKYGIESFALIHDSFGTIPADAANLFKAVRETFVDTYESCDVLADFYDQIADQLHESQRDKMPALPAKGNLNLRDILKSDFAFA

SEQ ID NO: 1869 - DNA, 2670 bp, synthetic construct
  misc_feature 1..2670: note = Variant of RNA polymerase
  source 1..2670: mol_type = other DNA
atgcaccatcaccatcaccatatgaacacgattaacattgctaagaacgacttctctgacatcgaactggctgctatcccgttcaacactctggctgaccattacggtgagcgtttagctcgcgaacagttggcccttgagcatgagtcttacgagatgggtgaagcacgcttccgcaagatgtttgagcgtcaacttaaagctggtgaggttgcggataacgctgccgccaagcctctcatcactaccctactccctaagatgattgcacgcatcaacgactggtttgaggaagtgaaagctaagcgcggcaagcgcccgacagccttccagttcctgcaagaaatcaagccggaagccgtagcgtacatcaccattaagaccactctggcttgcctaaccagtgcggacaatacgagtgttcaggctgtggcaagcgcaatcggtcgggccattgaggacgaggctcgcttcggtcgtatccgtgaccttgaagctaagcacttcaagaagaacgttgaggaacaactcaacaagcgcgtagggcacgtctacaagaaagcatttatgcaagttgtcgagcacgacatgctctctaagggtctactcggtggcggggcgtggtctatgtggcataaggaagactctattcatgtaggagtacgctgcatcgagatgctcattgagtcaaccggaatggttagcttacaccgccaaaatgctggcgtagtaggtcaagactctgagcgtatcgaactcgcacctgaatacgctgaggctatcgcaacccgtgcaggtgcgctggctggcatctctccgatgttccaaccttgcgtagttcctcctaagccgtggactggcattactggtggtggctattgggctgcggggcgcaaacccctgcagttagtacgtactcgcagtctggcggcgcttcgccgctatgaagaagtgtcgatgccggaggtcatcaaagcagtcaacattgcgcagaatacagcatggcgtattaacaagaaagttctcgacgtagcgaataccatcacccaatggaaacactgtccagtcgctgatatccctgcgatggatcgtggcgaaatgccagctcgtccgttggacatcgataccaacgagattgcacttaaagcgtggaagaaagaagcttccgcgttctaccgcaaagacaaagcacgcgttagccgtcgtctgtcaatggagtttatgttatctcaggcgaacaagtttgcgaattatgaggcaatctggtttccgcaaaacatggattggcgtgggcgcgtgtacgctgtcccgatgttcaatcctcagggcaacgatatgacgaaaggcctgctgacctttgcgcaggagaaacccattggtgaagacggcttctattggctcaagattcatggcgcaaatacagctggagtggataaagtaccgtttccacaacgcatcaaatttgttgaggataaccatacgaatattatggaatgcgcgaaagcaccgctggaaaacacttggtgggcggaacaggactcgccgttctgctttctggcgttctgctttgagtatgctggcgtcatcaatagtggtctgtcgtacaactgtagcttgcctctggcatttgatggtagttgctccggcctgcaacatttctcagcgatgttacgcgacgaaattggcggcaaagctgtgaatctcctcccatctgcggaataccaggatatttatcgtatcgtcagcgacaaagttaacgagatgctgaaacaagatctgattaacggtacctctaccaccgtggaaacggtgactgataagaagacaggcgaaattacccaacgcacgaaatacgggaccaaagttatggcacagtggtggttagaacacggtgtgaatcgtggcgtcacgaaacgctcggttatgactttggtgtatggggcgctggagtttggattccgcgatcaagtgctgagtgacaccgtcgggaaagcgatcgataacggcaagggtgacatgtttctgaatccgaatcaggctgctggttacatggcgaaactgatctggaacgcagtgtccgggaccgtagtcgcagcagttgaggcgatgaactggctgaaaagtgcggcgaaattacttgctgctgaagtgaaggatcgtaagacggatacagttctgcgtggccgctgcgcagtacattgggtgactcccgacggcttccctgtgtggcaggaatacaagaagcctattcagacgcgcttgaacctgatgttcctcggtcagttccgcttacagcctaccattaacaccaacaaagatagcgagattgatgcacgcaaacaggtgtctggtatcgctcctaactttgtacacagcctggacggtaaccaccttcgtatgactgtagtgtgggcacacgagaagtacggaatcgaatcttttgcactgattcacgactccttcggtaccattccggctgacgctgcgaacctgttcaaagcagtgcgcgaaactttcgttgacacatatgagtcttgtgatgtactggctgatttctacgaccagattgctgaccagttgcacgagtctcaacgcgacaaaatgccagcacttccggctaaaggtaacttgaacctccgtgacatcttaaaatcggacttcgcgttcgcg

SEQ ID NO: 1870 - protein, 890 aa, synthetic construct
  REGION 1..890: note = Variant of RNA polymerase
MHHHHHHMNTINIAKNDFSDIELAAIPFNTLADHYGERLAREQLALEHESYEMGEARFRKMFERQLKAGEVADNAAAKPLITTLLPKMIARINDWFEEVKAKRGKRPTAFQFLQEIKPEAVAYITIKTTLACLTSADNTSVQAVASAIGRAIEDEARFGRIRDLEAKHFKKNVEEQLNKRVGHVYKKAFMQVVEHDMLSKGLLGGGAWSMWHKEDSIHVGVRCIEMLIESTGMVSLHRQNAGVVGQDSERIELAPEYAEAIATRAGALAGISPMFQPCVVPPKPWTGITGGGYWAAGRKPLQLVRTRSLAALRRYEEVSMPEVIKAVNIAQNTAWRINKKVLDVANTITQWKHCPVADIPAMDRGEMPARPLDIDTNEIALKAWKKEASAFYRKDKARVSRRLSMEFMLSQANKFANYEAIWFPQNMDWRGRVYAVPMFNPQGNDMTKGLLTFAQEKPIGEDGFYWLKIHGANTAGVDKVPFPQRIKFVEDNHTNIMECAKAPLENTWWAEQDSPFCFLAFCFEYAGVINSGLSYNCSLPLAFDGSCSGLQHFSAMLRDEIGGKAVNLLPSAEYQDIYRIVSDKVNEMLKQDLINGTSTTVETVTDKKTGEITQRTKYGTKVMAQWWLEHGVNRGVTKRSVMTLVYGALEFGFRDQVLSDTVGKAIDNGKGDMFLNPNQAAGYMAKLIWNAVSGTVVAAVEAMNWLKSAAKLLAAEVKDRKTDTVLRGRCAVHWVTPDGFPVWQEYKKPIQTRLNLMFLGQFRLQPTINTNKDSEIDARKQVSGIAPNFVHSLDGNHLRMTVVWAHEKYGIESFALIHDSFGTIPADAANLFKAVRETFVDTYESCDVLADFYDQIADQLHESQRDKMPALPAKGNLNLRDILKSDFAFA

SEQ ID NO: 1871 - DNA, 2670 bp, synthetic construct
  misc_feature 1..2670: note = Variant of RNA polymerase
  source 1..2670: mol_type = other DNA
atgcaccatcaccatcaccatatgaacacgattaacattgctaagaacgacttctctgacatcgaactggctgctatcccgttcaacactctggctgaccattacggtgagcgtttagctcgcgaacagttggcccttgagcatgagtcttacgagatgggtgaagcacgcttccgcaagatgtttgagcgtcaacttaaagctggtgaggttgcggataacgctgccgccaagcctctcatcactaccctactccctaagatgattgcacgcatcaacgactggtttgaggaagtgaaagctaagcgcggcaagcgcccgacagccttccagttcctgcaagaaatcaagccggaagccgtagcgtacatcaccattaagaccactctggcttgcctaaccagtgcggacaatacaaccgttcaggctgtagcaagcgcaatcggtcgggccattgaggacgaggctcgcttcggtcgtatccgtgaccttgaagctaagcacttcaagaagaacgttgaggaacaactcaacaagcgcgtagggcacgtctacaagaaagcatttatgcaagttgtcgagcacgacatgctctctaagggtctactcggtggcgaggcgtggtcttcgtggcataaggaagactctattcatgtaggagtacgctgcatcgagatgctcattgagtcaaccggaatggttagtttacaccgccaaaatgctggcgtagtaggtcaagactctgagcgtatcgaactcgcacctgaatacgctgaggctatcgcaacccgtgcaggtgcgctggctggcatctctccgatgttccaaccttgcgtagttcctcctaagccgtggactggcattactggtggtggctattgggctgcggggcgcaaacccctgcagttagtacgtactcgcagtctggcggcgcttcgccgctatgaagaagtgtcgatgccggaggtcatcaaagcagtcaacattgcgcagaatacagcatggcgtattaacaagaaagttctcgacgtagcgaataccatcacccaatggaaacactgtccagtcgcagatatccctgcgatggatcgtggcgaaatgccagctcgtccgttggacatcgataccaacgagattgcacttaaagcgtggaagaaagaagcttccgcgttctaccgcaaagacaaagcacgcgttagccgtcgtctgtcaatggagtttatgttatctcaggcgaacaagtttgcgaattatgaggcaatctggtttccgtggaacatggattggcgtgggcgcgtgtacgctgtcccgatgttcaatcctcagggcaacgatatgacgaaaggcctgctgacctttgcgcaggagaaacccattggtgaagacggcttctattggctcaagattcatggcgcaaatacagctggagtggataaagtaccgtttccacaacgcatcaaatttgttgaggataaccatacgaatattatggaatgcgcgaaagcaccgctggaaaacacttggtgggcggaacaggactcgccgttctgctttctggcgttctgctttgagtatgctggcgtcatcaatagtggtctgtcgtacaactgtagcttgcctatggcattcgatggtagttgctccggcctgcaacatttctcagcgatgttacgcgacgaaattggcggcaaagctgtgaatctcctcccatctgcggaataccaggatatttatcgtatcgtcagcgacaaagttaacgagatgctgaaacaagatctgattaacggtacctctaccaccgtggaaacggtgactgataagaagacaggcgaaattacccaacgcacgaaatacgggaccaaagttatggcacagtggtggttagaacacggtgtgaatcgtggcgtcacgaaacgctcggttatgactttggtgtatggggcgctggagtttggattccgcgatcaagtgctgagtgacaccattcaaaaagcgatcgataacggcaagggtgacatgtttctgaatccgaatcaggctgctggttacatggcgaaactgatctggaacgcagtgtccgggaccgtagtcgcagcagttgaggcgatgaactggctgaaaagtgcggcgaaattacttgctgctgaagtgaaggatcgtaagacggatacagttctgcgtggccgctgcgcagtacattgggtgactcccgacggcttccctgtgtggcaggaatacaagaagcctattcagacgcgcttgaacctgatgttcctcggtcagttccgcttacagcctaccattaacaccaacaaagatagcgagattgatgtgcgcaaacaggtgtctggtatcgctcctaactttgtacacagcctggacggtaaccaccttcgtatgactgtagtgtgggcacacgagaagtacggaatcgaatcttttgcactgattcacgactccttcggtaccattccggctgacgctgcgaacctgttcaaagcagtgcgcgaaactttcgttgacacatatgagtcttgtgatgtactggctgatttctacgaccagattgctgaccagttgcacgagtctcaacgcgacaaaatgccagcacttccggctaaaggtaacttgaacctccgtgacatcttaaaatcggacttcgcgttcgcg

SEQ ID NO: 1872 - protein, 890 aa, synthetic construct
  REGION 1..890: note = Variant of RNA polymerase
MHHHHHHMNTINIAKNDFSDIELAAIPFNTLADHYGERLAREQLALEHESYEMGEARFRKMFERQLKAGEVADNAAAKPLITTLLPKMIARINDWFEEVKAKRGKRPTAFQFLQEIKPEAVAYITIKTTLACLTSADNTTVQAVASAIGRAIEDEARFGRIRDLEAKHFKKNVEEQLNKRVGHVYKKAFMQVVEHDMLSKGLLGGEAWSSWHKEDSIHVGVRCIEMLIESTGMVSLHRQNAGVVGQDSERIELAPEYAEAIATRAGALAGISPMFQPCVVPPKPWTGITGGGYWAAGRKPLQLVRTRSLAALRRYEEVSMPEVIKAVNIAQNTAWRINKKVLDVANTITQWKHCPVADIPAMDRGEMPARPLDIDTNEIALKAWKKEASAFYRKDKARVSRRLSMEFMLSQANKFANYEAIWFPWNMDWRGRVYAVPMFNPQGNDMTKGLLTFAQEKPIGEDGFYWLKIHGANTAGVDKVPFPQRIKFVEDNHTNIMECAKAPLENTWWAEQDSPFCFLAFCFEYAGVINSGLSYNCSLPMAFDGSCSGLQHFSAMLRDEIGGKAVNLLPSAEYQDIYRIVSDKVNEMLKQDLINGTSTTVETVTDKKTGEITQRTKYGTKVMAQWWLEHGVNRGVTKRSVMTLVYGALEFGFRDQVLSDTIQKAIDNGKGDMFLNPNQAAGYMAKLIWNAVSGTVVAAVEAMNWLKSAAKLLAAEVKDRKTDTVLRGRCAVHWVTPDGFPVWQEYKKPIQTRLNLMFLGQFRLQPTINTNKDSEIDVRKQVSGIAPNFVHSLDGNHLRMTVVWAHEKYGIESFALIHDSFGTIPADAANLFKAVRETFVDTYESCDVLADFYDQIADQLHESQRDKMPALPAKGNLNLRDILKSDFAFA

SEQ ID NO: 1873 - DNA, 2670 bp, synthetic construct
  misc_feature 1..2670: note = Variant of RNA polymerase
  source 1..2670: mol_type = other DNA
atgcaccatcaccatcaccatatgaacacgattaacattgctaagaacgacttctctgacatcgaactggctgctatcccgttcaacactctggctgaccattacggtgagcgtttagctcgcgaacagttggcccttgagcatgagtcttacgagatgggtgaagcacgcttccgcaagatgtttgagcgtcaacttaaagctggtgaggttgcggataacgctgccgccaagcctctcatcactaccctactccctaagatgattgcacgcatcaacgactggtttgaggaagtgaaagctaagcgcggcaagcgcccgacagccttccagttcctgcaagaaatcaagccggaagccgtagcgtacatcaccattaagaccactctggcttgcctaaccagtgcggacaatcgtactgttcaggctgtggcaagcgcaatcggtcgggccattgaggacgaggctcgcttcggtcgtatccgtgaccttgaagctaagcacttcaagaagaacgttgaggaacaactcaacaagcgcgtagggcacgtctacaagaaagcatttatgcaagttgtcgagcacgacatgctctctaagggtctactcggtggcggggcgtggtctagctggcataaggaagactctattcatgtaggagtacgctgcatcgagatgctcattgagtcaaccggaatggttagcttacaccgccaaaatgctggcgtagtaggtcaagactctgagcgtatcgaactcgcacctgaatacgctgaggctatcgcaacccgtgcaggtgcgctggctggcatctctccgatgttccaaccttgcgtagttcctcctaagccgtggactggcattactggtggtggctattgggctgcggggcgcaaacccctgcagttagtacgtactcgcagtctggcggcgcttcgccgctatgaagaagtgtcgatgccggaggtcatcaaagcagtcaacattgcgcagaatacagcatggcgtattaacaagaaagttctcgacgtagcgaataccatcacccaatggaaacactgtccagtcgctgatatccctgcgatggatcgtggcgaaatgccagctcgtccgttggacatcgataccaacgagattgcacttaaagcgtggaagaaagaagcttccgcgttctaccgcaaagacaaagcacgcgttagccgtcgtctgtcaatggagtttatgttatctcaggcgaacaagtttgcgaattatgaggcaatctggtttccgcaaaacatggattggcgtgggcgcgtgtacgctgtcccgatgttcaatcctcagggcaacgatatgacgaaaggcctgctgacctttgcgcaggagaaacccattggtgaagacggcttctattggctcaagattcatggcgcaaatacagctggagtggataaagtaccgtttccacaacgcatcaaatttgttgaggataaccatacgaatattatggaatgcgcgaaagcaccgctggaaaacacttggtgggcggaacaggactcgccgttctgctttctggcgttctgctttgagtatgctggcgtcatcaatagtggtctgtcgtacaactgtagcttgcctctggcatttgatggtagttgctccggcctgcaacatttctcagcgatgttacgcgacgaaattggcggcaaagctgtgaatctcctcccatctgcggaataccaggatatttatcgtatcgtcagcgacaaagttaacgagatgctgaaacaagatctgattaacggtacctctaccaccgtggaaacggtgactgataagaagacaggcgaaattacccaacgcacgaaatacgggaccaaagttatggcacagtggtggttagaacacggtgtgaatcgtggcgtcacgaaacgctcggttatgactttggtgtatggggcgctggagtttggattccgcgatcaagtgctgaaggacaccatcgggaaagcgatcgataacggcaagggtgacatgtttctgaatccgaatcaggctgctggttacatggcgaaactgatctggaacgcagtgtccgggaccgtagtcgcagcagttgaggcgatgaactggctgaaaagtgcggcgaaattacttgctgctgaagtgaaggatcgtaagacggatacagttctgcgtggccgctgcgcagtacattgggtgactcccgacggcttccctgtgtggcaggaatacaagaagcctattcagacgcgcttgaacctgatgttcctcggtcagttccgcttacagcctaccattaacaccaacaaagatagcgagattgatgcacgcaaacagatgtctggtatcgctcctaactttgtacacagcctggacgcgaaccaccttcgtatgactgtagtgtgggcacacgagaagtacggaatcgaatcttttgcactgattcacgactccttcggtaccattccggctgacgctgcgaacctgttcaaagcagtgcgcgaaactttcgttgacacatatgagtcttgtgatgtactggctgatttctacgaccagattgctgaccagttgcacgagtctcaacgcgacaaaatgccagcacttccggctaaaggtaacttgaacctccgtgacatcttaaaatcggacttcgcgttcgcg

SEQ ID NO: 1874 - protein, 890 aa, synthetic construct
  REGION 1..890: note = Variant of RNA polymerase
MHHHHHHMNTINIAKNDFSDIELAAIPFNTLADHYGERLAREQLALEHESYEMGEARFRKMFERQLKAGEVADNAAAKPLITTLLPKMIARINDWFEEVKAKRGKRPTAFQFLQEIKPEAVAYITIKTTLACLTSADNRTVQAVASAIGRAIEDEARFGRIRDLEAKHFKKNVEEQLNKRVGHVYKKAFMQVVEHDMLSKGLLGGGAWSSWHKEDSIHVGVRCIEMLIESTGMVSLHRQNAGVVGQDSERIELAPEYAEAIATRAGALAGISPMFQPCVVPPKPWTGITGGGYWAAGRKPLQLVRTRSLAALRRYEEVSMPEVIKAVNIAQNTAWRINKKVLDVANTITQWKHCPVADIPAMDRGEMPARPLDIDTNEIALKAWKKEASAFYRKDKARVSRRLSMEFMLSQANKFANYEAIWFPQNMDWRGRVYAVPMFNPQGNDMTKGLLTFAQEKPIGEDGFYWLKIHGANTAGVDKVPFPQRIKFVEDNHTNIMECAKAPLENTWWAEQDSPFCFLAFCFEYAGVINSGLSYNCSLPLAFDGSCSGLQHFSAMLRDEIGGKAVNLLPSAEYQDIYRIVSDKVNEMLKQDLINGTSTTVETVTDKKTGEITQRTKYGTKVMAQWWLEHGVNRGVTKRSVMTLVYGALEFGFRDQVLKDTIGKAIDNGKGDMFLNPNQAAGYMAKLIWNAVSGTVVAAVEAMNWLKSAAKLLAAEVKDRKTDTVLRGRCAVHWVTPDGFPVWQEYKKPIQTRLNLMFLGQFRLQPTINTNKDSEIDARKQMSGIAPNFVHSLDANHLRMTVVWAHEKYGIESFALIHDSFGTIPADAANLFKAVRETFVDTYESCDVLADFYDQIADQLHESQRDKMPALPAKGNLNLRDILKSDFAFA

SEQ ID NO: 1875 - DNA, 2670 bp, synthetic construct
  misc_feature 1..2670: note = Variant of RNA polymerase
  source 1..2670: mol_type = other DNA
atgcaccatcaccatcaccatatgaacacgattaacattgctaagaacgacttctctgacatcgaactggctgctatcccgttcaacactctggctgaccattacggtgagcgtttagctcgcgaacagttggcccttgagcatgagtcttacgagatgggtgaagcacgcttccgcaagatgtttgagcgtcaacttaaagctggtgaggttgcggataacgctgccgccaagcctctcatcactaccctactccctaagatgattgcacgcatcaacgactggtttgaggaagtgaaacgcaagcgcggcaagcgcccgacagccttccagttcctgcaagaaatcaagccggaagccgtagcgtacatcaccattaagaccactctggctctgctaaccagtgcggacaatacaaccgttcaggctgtagcaagcgcaatcggtaaagccattgaggacgaggctcgcttcggtcgtatccgtgaccttgaagctaagcacttcaagaagaacgttgaggaacaactcaacaagcgcgtagggcacgtctacaagaaagcatttatgcaagttgtcgagcacgacatgctctctaagggtctactcggtggcgaggcgtggtcttcgtggcataaggaagactctattcatgtaggagtacgctgcatcgagatgctcattgagtcaaccggaatggttagtttacaccgccaaaatgctggcgtagtaggtcaagactctgagcgtatcgaactcgcacctgaatacgctgaggctatcgcaacccgtgcaggtgcgctggctggcatctctccgatgttccaaccttgcgtagttcctcctaagccgtggactggcattactggtggtggctattgggctgcggggcgcaaacccctgcagttagtacgtactcgcagtctggcggcgcttcgccgctatgaagaagtgtcgatgccggaggtcatcaaagcagtcaacattgcgcagaatacagcatggcgtattaacaagaaagttctcgacgtagcgaataccatcacccaatggaaacactgtccagtcgcagatatccctgcgatggatcgtggcgaaatgccagctcgtccgttggacatcgataccaacgagattgcacttaaagcgtggaagaaagaagcttccgcgttctaccgcaaagacaaagcacgcgttagccgtcgtctgtcaatggagtttatgttatctcaggcgaacaagtttgcgaattatgaggcaatctggtttccgtggaacatggattggcgtgggcgcgtgtacgctgtcccgatgttcaatcctcagggcaacgatatgacgaaaggcctgctgacctttgcgcaggagaaacccattggtgaagacggcttctattggctcaagattcatggcgcaaatacagctggagtggataaagtaccgtttccacaacgcatcaaatttgttgaggataaccatacgaatattatggaatgcgcgaaagcaccgctggaaaacacttggtgggcggaacaggactcgccgttctgctttctggcgttctgctttgagtatgctggcgtcatcaatagtggtctgtcgtacaactgtagcttgcctatggcattcgatggtagttgctccggcctgcaacatttctcagcgatgttacgcgacgaaattggcggcaaagctgtgaatctcctcccatctgcggaataccaggatatttatcgtatcgtcagcgacaaagttaacgagatgctgaaacaagatctgattaacggtacctctaccaccgtggaaacggtgactgataagaagacaggcgaaattacccaacgcacgaaatacgggaccaaagttatggcacagtggtggttagaacacggtgtgaatcgtggcgtcacgaaacgctcggttatgactttggtgtatggggcgctggagtttggattccgcgatcaagtgctgagtgacaccattcaaaaagcgatcgataacggcaagggtgacatgtttctgaatccgaatcaggctgctggttacatggcgaaactgatctggaacgcagtgtccgggaccgtagtcgcagcagttgaggcgatgaactggctgaaaagtgcggcgaaattacttgctgctgaagtgaaggatcgtaagacggatacagttctgcgtggccgctgcgcagtacattgggtgactcccgacggcttccctgtgtggcaggaatacaagaagcctattcagacgcgcttgaacctgatgttcctcggtcagttccgcttacagcctaccattaacaccaacaaagatagcgagattgatgtgcgcaaacaggtgtctggtatcgctcctaactttgtacacagcctggacggtaaccaccttcgtatgactgtagtgtgggcacacgagaagtacggaatcgaatcttttgcactgattcacgactccttcggtaccattccggctgacgctgcgaacctgttcaaagcagtgcgcgaaactttcgttgacacatatgagtcttgtgatgtactggctgatttctacgaccagattgctgaccagttgcacgagtctcaacgcgacaaaatgccagcacttccggctaaaggtaacttgaacctccgtgacatcttaaaatcggacttcgcgttcgcg

SEQ ID NO: 1876 - protein, 890 aa, synthetic construct
  REGION 1..890: note = Variant of RNA polymerase
MHHHHHHMNTINIAKNDFSDIELAAIPFNTLADHYGERLAREQLALEHESYEMGEARFRKMFERQLKAGEVADNAAAKPLITTLLPKMIARINDWFEEVKRKRGKRPTAFQFLQEIKPEAVAYITIKTTLALLTSADNTTVQAVASAIGKAIEDEARFGRIRDLEAKHFKKNVEEQLNKRVGHVYKKAFMQVVEHDMLSKGLLGGEAWSSWHKEDSIHVGVRCIEMLIESTGMVSLHRQNAGVVGQDSERIELAPEYAEAIATRAGALAGISPMFQPCVVPPKPWTGITGGGYWAAGRKPLQLVRTRSLAALRRYEEVSMPEVIKAVNIAQNTAWRINKKVLDVANTITQWKHCPVADIPAMDRGEMPARPLDIDTNEIALKAWKKEASAFYRKDKARVSRRLSMEFMLSQANKFANYEAIWFPWNMDWRGRVYAVPMFNPQGNDMTKGLLTFAQEKPIGEDGFYWLKIHGANTAGVDKVPFPQRIKFVEDNHTNIMECAKAPLENTWWAEQDSPFCFLAFCFEYAGVINSGLSYNCSLPMAFDGSCSGLQHFSAMLRDEIGGKAVNLLPSAEYQDIYRIVSDKVNEMLKQDLINGTSTTVETVTDKKTGEITQRTKYGTKVMAQWWLEHGVNRGVTKRSVMTLVYGALEFGFRDQVLSDTIQKAIDNGKGDMFLNPNQAAGYMAKLIWNAVSGTVVAAVEAMNWLKSAAKLLAAEVKDRKTDTVLRGRCAVHWVTPDGFPVWQEYKKPIQTRLNLMFLGQFRLQPTINTNKDSEIDVRKQVSGIAPNFVHSLDGNHLRMTVVWAHEKYGIESFALIHDSFGTIPADAANLFKAVRETFVDTYESCDVLADFYDQIADQLHESQRDKMPALPAKGNLNLRDILKSDFAFA

SEQ ID NO: 1877 - DNA, 2670 bp, synthetic construct
  misc_feature 1..2670: note = Variant of RNA polymerase
  source 1..2670: mol_type = other DNA
atgcaccatcaccatcaccatatgaacacgattaacattgctaagaacgacttctctgacatcgaactggctgctatcccgttcaacactctggctgaccattacggtgagcgtttagctcgcgaacagttggcccttgagcatgagtcttacgagatgggtgaagcacgcttccgcaagatgtttgagcgtcaacttaaagctggtgaggttgcggataacgctgccgccaagcctctcatcactaccctactccctaagatgattgcacgcatcaacgactggtttgaggaagtgaaagctaagcgcggcaagcgcccgacagccttccagttcctgcaagaaatcaagccggaagccgtagcgtacatcaccattaagaccactctggcttgcctaaccagtgcggacaatcgtactgttcaggctctggcaagcgcaatcggtcgggccattgaggacgaggctcgcttcggtcgtatccgtgaccttgaagctaagcacttcaagaagaacgttgaggaacaactcaacaagcgcgtagggcacgtctacaagaaagcatttatgcaagttgtcgagcacgacatgctctctaagggtctactcggtggcgaggcgtggtctagctggcataaggaagactctattcatgtaggagtacgctgcatcgagatgctcattgagtcaaccggaatggttagcttacaccgccaaaatgctggcgtagtaggtcaagactctgagcgtatcgaactcgcacctgaatacgctgaggctatcgcaacccgtgcaggtgcgctggctggcatctctccgatgttccaaccttgcgtagttcctcctaagccgtggactggcattactggtggtggctattgggctgcggggcgcaaacccctgcagttagtacgtactcgcagtctggcggcgcttcgccgctatgaagaagtgtcgatgccggaggtcatcaaagcagtcaacattgcgcagaatacagcatggcgtattaacaagaaagttctcgacgtagcgaataccatcacccaatggaaacactgtccagtcgctgatatccctgcgatggatcgtggcgaaatgccagctcgtccgttggacatcgataccaacgagattgcacttaaagcgtggaagaaagaagcttccgcgttctaccgcaaagacaaagcacgcgttagccgtcgtctgtcaatggagtttatgttatctcaggcgaacaagtttgcgaattatgaggcaatctggtttccgcaaaacatggattggcgtgggcgcgtgtacgctgtcccgatgttcaatcctcagggcaacgatatgacgaaaggcctgctgacctttgcgcaggagaaacccattggtgaagacggcttctattggctcaagattcatggcgcaaatacagctggagtggataaagtaccgtttccacaacgcatcaaatttgttgaggataaccatacgaatattatggaatgcgcgaaagcaccgctggaaaacacttggtgggcggaacaggactcgccgttctgctttctggcgttctgctttgagtatgctggcgtcatcaatagtggtctgtcgtacaactgtagcttgcctctggcatttgatggtagttgctccggcctgcaacatttctcagcgatgttacgcgacgaaattggcggcaaagctgtgaatctcctcccatctgcggaataccaggatatttatcgtatcgtcagcgacaaagttaacgagatgctgaaacaagatctgattaacggtacctctaccaccgtggaaacggtgactgataagaagacaggcgaaattacccaacgcacgaaatacgggaccaaagttatggcacagtggtggttagaacacggtgtgaatcgtggcgtcacgaaacgctcggttatgactttggtgtatggggcgctggagtttggattccgcgatcaagtgctgggtgacaccatccagaaagcgatcgataacggcaagggtgacatgtttctgaatccgaatcaggctgctggttacatggcgaaactgatctggaacgcagtgtccgggaccgtagtcgcagcagttgaggcgatgaactggctgaaaagtgcggcgaaattacttgctgctgaagtgaaggatcgtaagacggatacagttctgcgtggccgctgcgcagtacattgggtgactcccgacggcttccctgtgtggcaggaatacaagaagcctattcagacgcgcttgaacctgatgttcctcggtcagttccgcttacagcctaccattaacaccaacaaagatagcgagattgatgcacgcaaacagatgtctggtatcgctcctaactttgtacacagcctggacggtaaccaccttcgtatgactgtagtgtgggcacacgagaagtacggaatcgaatcttttgcactgattcacgactccttcggtaccattccggctgacgctgcgaacctgttcaaagcagtgcgcgaaactttcgttgacacatatgagtcttgtgatgtactggctgatttctacgaccagattgctgaccagttgcacgagtctcaacgcgacaaaatgccagcacttccggctaaaggtaacttgaacctccgtgacatcttaaaatcggacttcgcgttcgcg

SEQ ID NO: 1878 - protein, 890 aa, synthetic construct
  REGION 1..890: note = Variant of RNA polymerase
MHHHHHHMNTINIAKNDFSDIELAAIPFNTLADHYGERLAREQLALEHESYEMGEARFRKMFERQLKAGEVADNAAAKPLITTLLPKMIARINDWFEEVKAKRGKRPTAFQFLQEIKPEAVAYITIKTTLACLTSADNRTVQALASAIGRAIEDEARFGRIRDLEAKHFKKNVEEQLNKRVGHVYKKAFMQVVEHDMLSKGLLGGEAWSSWHKEDSIHVGVRCIEMLIESTGMVSLHRQNAGVVGQDSERIELAPEYAEAIATRAGALAGISPMFQPCVVPPKPWTGITGGGYWAAGRKPLQLVRTRSLAALRRYEEVSMPEVIKAVNIAQNTAWRINKKVLDVANTITQWKHCPVADIPAMDRGEMPARPLDIDTNEIALKAWKKEASAFYRKDKARVSRRLSMEFMLSQANKFANYEAIWFPQNMDWRGRVYAVPMFNPQGNDMTKGLLTFAQEKPIGEDGFYWLKIHGANTAGVDKVPFPQRIKFVEDNHTNIMECAKAPLENTWWAEQDSPFCFLAFCFEYAGVINSGLSYNCSLPLAFDGSCSGLQHFSAMLRDEIGGKAVNLLPSAEYQDIYRIVSDKVNEMLKQDLINGTSTTVETVTDKKTGEITQRTKYGTKVMAQWWLEHGVNRGVTKRSVMTLVYGALEFGFRDQVLGDTIQKAIDNGKGDMFLNPNQAAGYMAKLIWNAVSGTVVAAVEAMNWLKSAAKLLAAEVKDRKTDTVLRGRCAVHWVTPDGFPVWQEYKKPIQTRLNLMFLGQFRLQPTINTNKDSEIDARKQMSGIAPNFVHSLDGNHLRMTVVWAHEKYGIESFALIHDSFGTIPADAANLFKAVRETFVDTYESCDVLADFYDQIADQLHESQRDKMPALPAKGNLNLRDILKSDFAFA

SEQ ID NO: 1879 - DNA, 2670 bp, synthetic construct
  misc_feature 1..2670: note = Variant of RNA polymerase
  source 1..2670: mol_type = other DNA
atgcaccatcaccatcaccatatgaacacgattaacattgctaagaacgacttctctgacatcgaactggctgctatcccgttcaacactctggctgaccattacggtgagcgtttagctcgcgaacagttggcccttgagcatgagtcttacgagatgggtgaagcacgcttccgcaagatgtttgagcgtcaacttaaagctggtgaggttgcggataacgctgccgccaagcctctcatcactaccctactccctaagatgattgcacgcatcaacgactggtttgaggaagtgaaagctaagcgcggcaagcgcccgacagccttccagttcctgcaagaaatcaagccggaagccgtagcgtacatcaccattaagaccactctggcttgcctaaccagtgcggacaatacgcgtgttcaggctgtggcaagcgcaatcggtcgggccattgaggacgaggctcgcttcggtcgtatccgtgaccttgaagctaagcacttcaagaagaacgttgaggaacaactcaacaagcgcgtagggcacgtctacaagaaagcatttatgcaagttgtcgagcacgacatgctctctaagggtctactcggtggcgaggcgtggtcttcgtggcataaggaagactctattcatgtaggagtacgctgcatcgagatgctcattgagtcaaccggaatggttagcttacaccgccaaaatgctggcgtagtaggtcaagactctgagcgtatcgaactcgcacctgaatacgctgaggctatcgcaacccgtgcaggtgcgctggctggcatctctccgatgttccaaccttgcgtagttcctcctaagccgtggactggcattactggtggtggctattgggctgcggggcgcaaacccctgcagttagtacgtactcgcagtctggcggcgcttcgccgctatgaagaagtgtcgatgccggaggtcatcaaagcagtcaacattgcgcagaatacagcatggcgtattaacaagaaagttctcgacgtagcgaataccatcacccaatggaaacactgtccagtcgctgatatccctgcgatggatcgtggcgaaatgccagctcgtccgttggacatcgataccaacgagattgcacttaaagcgtggaagaaagaagcttccgcgttctaccgcaaagacaaagcacgcgttagccgtcgtctgtcaatggagtttatgttatctcaggcgaacaagtttgcgaattatgaggcaatctggtttccgcaaaacatggattggcgtgggcgcgtgtacgctgtcccgatgttcaatcctcagggcaacgatatgacgaaaggcctgctgacctttgcgcaggagaaacccattggtgaagacggcttctattggctcaagattcatggcgcaaatacagctggagtggataaagtaccgtttccacaacgcatcaaatttgttgaggataaccatacgaatattatggaatgcgcgaaagcaccgctggaaaacacttggtgggcggaacaggactcgccgttctgctttctggcgttctgctttgagtatgctggcgtcatcaatagtggtctgtcgtacaactgtagcttgcctctggcatttgatggtagttgctccggcctgcaacatttctcagcgatgttacgcgacgaaattggcggcaaagctgtgaatctcctcccatctgcggaataccaggatatttatcgtatcgtcagcgacaaagttaacgagatgctgaaacaagatctgattaacggtacctctaccaccgtggaaacggtgactgataagaagacaggcgaaattacccaacgcacgaaatacgggaccaaagttatggcacagtggtggttagaacacggtgtgaatcgtggcgtcacgaaacgctcggttatgactttggtgtatggggcgctggagtttggattccgcgatcaagtgctgagtgacaccattcaaaaagcgatcgataacggcaagggtgacatgtttctgaatccgaatcaggctgctggttacatggcgaaactgatctggaacgcagtgtccgggaccgtagtcgcagcagttgaggcgatgaactggctgaaaagtgcggcgaaattacttgctgctgaagtgaaggatcgtaagacggatacagttctgcgtggccgctgcgcagtacattgggtgactcccgacggcttccctgtgtggcaggaatacaagaagcctattcagacgcgcttgaacctgatgttcctcggtcagttccgcttacagcctaccattaacaccaacaaagatagcgagattgatgcacgcaaacaggtgtctggtatcgctcctaactttgtacacagcctggacggtaaccaccttcgtatgactgtagtgtgggcacacgagaagtacggaatcgaatcttttgcactgattcacgactccttcggtaccattccggctgacgctgcgaacctgttcaaagcagtgcgcgaaactttcgttgacacatatgagtcttgtgatgtactggctgatttctacgaccagattgctgaccagttgcacgagtctcaacgcgacaaaatgccagcacttccggctaaaggtaacttgaacctccgtgacatcttaaaatcggacttcgcgttcgcg

SEQ ID NO: 1880 - protein, 890 aa, synthetic construct
  REGION 1..890: note = Variant of RNA polymerase
MHHHHHHMNTINIAKNDFSDIELAAIPFNTLADHYGERLAREQLALEHESYEMGEARFRKMFERQLKAGEVADNAAAKPLITTLLPKMIARINDWFEEVKAKRGKRPTAFQFLQEIKPEAVAYITIKTTLACLTSADNTRVQAVASAIGRAIEDEARFGRIRDLEAKHFKKNVEEQLNKRVGHVYKKAFMQVVEHDMLSKGLLGGEAWSSWHKEDSIHVGVRCIEMLIESTGMVSLHRQNAGVVGQDSERIELAPEYAEAIATRAGALAGISPMFQPCVVPPKPWTGITGGGYWAAGRKPLQLVRTRSLAALRRYEEVSMPEVIKAVNIAQNTAWRINKKVLDVANTITQWKHCPVADIPAMDRGEMPARPLDIDTNEIALKAWKKEASAFYRKDKARVSRRLSMEFMLSQANKFANYEAIWFPQNMDWRGRVYAVPMFNPQGNDMTKGLLTFAQEKPIGEDGFYWLKIHGANTAGVDKVPFPQRIKFVEDNHTNIMECAKAPLENTWWAEQDSPFCFLAFCFEYAGVINSGLSYNCSLPLAFDGSCSGLQHFSAMLRDEIGGKAVNLLPSAEYQDIYRIVSDKVNEMLKQDLINGTSTTVETVTDKKTGEITQRTKYGTKVMAQWWLEHGVNRGVTKRSVMTLVYGALEFGFRDQVLSDTIQKAIDNGKGDMFLNPNQAAGYMAKLIWNAVSGTVVAAVEAMNWLKSAAKLLAAEVKDRKTDTVLRGRCAVHWVTPDGFPVWQEYKKPIQTRLNLMFLGQFRLQPTINTNKDSEIDARKQVSGIAPNFVHSLDGNHLRMTVVWAHEKYGIESFALIHDSFGTIPADAANLFKAVRETFVDTYESCDVLADFYDQIADQLHESQRDKMPALPAKGNLNLRDILKSDFAFA

SEQ ID NO: 1881 - DNA, 2670 bp, synthetic construct
  misc_feature 1..2670: note = Variant of RNA polymerase
  source 1..2670: mol_type = other DNA
atgcaccatcaccatcaccatatgaacacgattaacattgctaagaacgacttctctgacatcgaactggctgctatcccgttcaacactctggctgaccattacggtgagcgtttagctcgcgaacagttggcccttgagcatgagtcttacgagatgggtgaagcacgcttccgcaagatgtttgagcgtcaacttaaagctggtgaggttgcggataacgctgccgccaagcctctcatcactaccctactccctaagatgattgcacgcatcaacgactggtttgaggaagtgaaagctaagcgcggcaagcgcccgacagccttccagttcctgcaagaaatcaagccggaagccgtagcgtacatcaccattaagaccactctggcttgcctaaccagtgcggacaatacaaccgttcaggctgtagcaagcgcaatcggtcgggccattgaggacgaggctcgcttcggtcgtatccgtgaccttgaagctaagcacttcaagaagaacgttgaggaacaactcaacaagcgcgtagggcacgtctacaagaaagcatttatgcaagttgtcgagcacgacatgctctctaagggtctactcggtggcgaggcgtggtcttcgtggcataaggaagactctattcatgtaggagtacgctgcatcgagatgctcattgagtcaaccggaatggttagcttacaccgccaaaatgctggcgtagtaggtcaagactctgagcgtatcgaactcgcacctgaatacgctgaggctatcgcaacccgtgcaggtgcgctggctggcatctctccgatgttccaaccttgcgtagttcctcctaagccgtggactggcattactggtggtggctattgggctgcggggcgcaaacccctgcagttagtacgtactcgcagtctggcggcgcttcgccgctatgaagaagtgtcgatgccggaggtcatcaaagcagtcaacattgcgcagaatacagcatggcgtattaacaagaaagttctcgacgtagcgaataccatcacccaatggaaacactgtccagtcgctgatatccctgcgatggatcgtggcgaaatgccagctcgtccgttggacatcgataccaacgagattgcacttaaagcgtggaagaaagaagcttccgcgttctaccgcaaagacaaagcacgcgttagccgtcgtctgtcaatggagtttatgttatctcaggcgaacaagtttgcgaattatgaggcaatctggtttccgcaaaacatggattggcgtgggcgcgtgtacgctgtcccgatgttcaatcctcagggcaacgatatgacgaaaggcctgctgacctttgcgcaggagaaacccattggtgaagacggcttctattggctcaagattcatggcgcaaatacagctggagtggataaagtaccgtttccacaacgcatcaaatttgttgaggataaccatacgaatattatggaatgcgcgaaagcaccgctggaaaacacttggtgggcggaacaggactcgccgttctgctttctggcgttctgctttgagtatgctggcgtcatcaatagtggtctgtcgtacaactgtagcttgcctctggcatttgatggtagttgctccggcctgcaacatttctcagcgatgttacgcgacgaaattggcggcaaagctgtgaatctcctcccatctgcggaataccaggatatttatcgtatcgtcagcgacaaagttaacgagatgctgaaacaagatctgattaacggtacctctaccaccgtggaaacggtgactgataagaagacaggcgaaattacccaacgcacgaaatacgggaccaaagttatggcacagtggtggttagaacacggtgtgaatcgtggcgtcacgaaacgctcggttatgactttggtgtatggggcgctggagtttggattccgcgatcaagtgctgggtgacaccatccagaaagcgatcgataacggcaagggtgacatgtttctgaatccgaatcaggctgctggttacatggcgaaactgatctggaacgcagtgtccgggaccgtagtcgcagcagttgaggcgatgaactggctgaaaagtgcggcgaaattacttgctgctgaagtgaaggatcgtaagacggatacagttctgcgtggccgctgcgcagtacattgggtgactcccgacggcttccctgtgtggcaggaatacaagaagcctattcagacgcgcttgaacctgatgttcctcggtcagttccgcttacagcctaccattaacaccaacaaagatagcgagattgatgcacgcaaacaggtgtctggtatcgctcctaactttgtacacagcctggacggtaaccaccttcgtatgactgtagtgtgggcacacgagaagtacggaatcgaatcttttgcactgattcacgactccttcggtaccattccggctgacgctgcgaacctgttcaaagcagtgcgcgaaactttcgttgacacatatgagtcttgtgatgtactggctgatttctacgaccagattgctgaccagttgcacgagtctcaacgcgacaaaatgccagcacttccggctaaaggtaacttgaacctccgtgacatcttaaaatcggacttcgcgttcgcg

SEQ ID NO: 1882 - protein, 890 aa, synthetic construct
  REGION 1..890: note = Variant of RNA polymerase
MHHHHHHMNTINIAKNDFSDIELAAIPFNTLADHYGERLAREQLALEHESYEMGEARFRKMFERQLKAGEVADNAAAKPLITTLLPKMIARINDWFEEVKAKRGKRPTAFQFLQEIKPEAVAYITIKTTLACLTSADNTTVQAVASAIGRAIEDEARFGRIRDLEAKHFKKNVEEQLNKRVGHVYKKAFMQVVEHDMLSKGLLGGEAWSSWHKEDSIHVGVRCIEMLIESTGMVSLHRQNAGVVGQDSERIELAPEYAEAIATRAGALAGISPMFQPCVVPPKPWTGITGGGYWAAGRKPLQLVRTRSLAALRRYEEVSMPEVIKAVNIAQNTAWRINKKVLDVANTITQWKHCPVADIPAMDRGEMPARPLDIDTNEIALKAWKKEASAFYRKDKARVSRRLSMEFMLSQANKFANYEAIWFPQNMDWRGRVYAVPMFNPQGNDMTKGLLTFAQEKPIGEDGFYWLKIHGANTAGVDKVPFPQRIKFVEDNHTNIMECAKAPLENTWWAEQDSPFCFLAFCFEYAGVINSGLSYNCSLPLAFDGSCSGLQHFSAMLRDEIGGKAVNLLPSAEYQDIYRIVSDKVNEMLKQDLINGTSTTVETVTDKKTGEITQRTKYGTKVMAQWWLEHGVNRGVTKRSVMTLVYGALEFGFRDQVLGDTIQKAIDNGKGDMFLNPNQAAGYMAKLIWNAVSGTVVAAVEAMNWLKSAAKLLAAEVKDRKTDTVLRGRCAVHWVTPDGFPVWQEYKKPIQTRLNLMFLGQFRLQPTINTNKDSEIDARKQVSGIAPNFVHSLDGNHLRMTVVWAHEKYGIESFALIHDSFGTIPADAANLFKAVRETFVDTYESCDVLADFYDQIADQLHESQRDKMPALPAKGNLNLRDILKSDFAFA

SEQ ID NO: 1883 - DNA, 2670 bp, synthetic construct
  misc_feature 1..2670: note = Variant of RNA polymerase
  source 1..2670: mol_type = other DNA
atgcaccatcaccatcaccatatgaacacgattaacattgctaagaacgacttctctgacatcgaactggctgctatcccgttcaacactctggctgaccattacggtgagcgtttagctcgcgaacagttggcccttgagcatgagtcttacgagatgggtgaagcacgcttccgcaagatgtttgagcgtcaacttaaagctggtgaggttgcggataacgctgccgccaagcctctcatcactaccctactccctaagatgattgcacgcatcaacgactggtttgaggaagtgaaagccaagcgcggcaagcgcccgacagccttccagttcctgcaagaaatcaagccggaagccgtagcgtacatcaccattaagaccactctggcttgcctaaccagtgcggacaatacaaccgttcaggctgtagcaagcgcaatcggtaaagccattgaggacgaggctcgcttcggtcgtatccgtgaccttgaagctaagcacttcaagaagaacgttgaggaacaactcaacaagcgcgtagggcacgtctacaagaaagcatttatgcaagttgtcgagcacgacatgctctctaagggtctactcgggggcgtggcatggccgtcgtggcataaggaagactctattcatgtaggagtacgctgcatcgagatgctcattgagtcaaccggaatggttctgttacaccgccaaaatgctggcgtagtaggtcaagactctgagcgtatcgaactcgcacctgaatacgctgaggctatcgcaacccgtgcaggtgcgctggctggcatctctccgatgttccaaccttgcgtagttcctcctaagccgtggactggcattactggtggtggctattgggctgcggggcgcaaacccctgcagttagtacgtactcgcagtctggcggcgcttcgccgctatgaagaagtgtcgatgccggaggtcatcaaagcagtcaacattgcgcagaatacagcatggcgtattaacaagaaagttctcgacgtagcgaataccatcacccaatggaaacactgtccagtccgcgatatccctgcgatggatcgtggcgaaatgccagctcgtccgttggacatcgataccaacgagattgcacttaaagcgtggaagaaagaagcttccgcgttctaccgcaaagacaaagcacgcgttagccgtcgtctgtcaatggagtttatgttatctcaggcgaacaagtttgcgaattatgaggcaatctggtttccgcaaaacatggattggcgtgggcgcgtgtacgctgtcccgatgttcaatcctcagggcaacgatatgacgaaaggcctgctgacctttgcgcaggagaaacccattggtgaagacggcttctattggctcaagattcatggcgcaaatacagctggagtggataaagtaccgtttccacaacgcatcaaatttgttgaggataaccatacgaatattatggaatgcgcgaaagcaccgctggaaaacacttggtgggcggaacaggactcgccgttctgctttctggcgttctgctttgagtatgctggcgtcatcaatagtggtctgtcgtacaactgtagcttgcctctggcatgggatggtagttgctccggcctgcaacatttctcagcgatgttacgcgacgaaattggcggcaaagctgtgaatctcctcccatctgcggaataccaggatatttatcgtatcgtcagcgacaaagttaacgagatgctgaaacaagatctgattaacggtacctctaccaccgtggaaacggtgactgataagaagacaggcgaaattacccaacgcacgaaatacgggaccaaagttatggcacagtggtggttagaacacggtgtgaatcgtggcgtcacgaaacgctcggttatgactttggtgtatggggcgctggagtttggattccgcgatcaagtgctgagtgacaccattcaaaaagcgatcgataacggcaagggtgacatgtttctgaatccgaatcaggctgctggttacatggcgaaactgatctggaacgcagtgtccgggaccgtagtcgcagcagttgaggcgatgaactggctgaaaagtgcggcgaaattacttgctgctgaagtgaaggatcgtaagacggatacagttctgcgtggccgctgcgcagtacattgggtgactcccgacggcttccctgtgtggcaggaatacaagaagcctattcagacgcgcttgaacctgatgttcctcggtcagttccgcttacagcctaccattaacaccaacaaagatagcgagattgatgtgcgcaaacaggtgtctggtatcgctcctaactttgtacacagcctggacggtaaccaccttcgtatgactgtagtgtgggcacacgagaagtacggaatcgaatcttttgcactgattcacgactccttcggtaccattccggctgacgctgcgaacctgttcaaagcagtgcgcgaaactttcgttgacacatatgagtcttgtgatgtactggctgatttctacgaccagattgctgaccagttgcacgagtctcaacgcgacaaaatgccagcacttccggctaaaggtaacttgaacctccgtgacatcttaaaatcggacttcgcgttcgcg

SEQ ID NO: 1884 - protein, 890 aa, synthetic construct
  REGION 1..890: note = Variant of RNA polymerase
MHHHHHHMNTINIAKNDFSDIELAAIPFNTLADHYGERLAREQLALEHESYEMGEARFRKMFERQLKAGEVADNAAAKPLITTLLPKMIARINDWFEEVKAKRGKRPTAFQFLQEIKPEAVAYITIKTTLACLTSADNTTVQAVASAIGKAIEDEARFGRIRDLEAKHFKKNVEEQLNKRVGHVYKKAFMQVVEHDMLSKGLLGGVAWPSWHKEDSIHVGVRCIEMLIESTGMVLLHRQNAGVVGQDSERIELAPEYAEAIATRAGALAGISPMFQPCVVPPKPWTGITGGGYWAAGRKPLQLVRTRSLAALRRYEEVSMPEVIKAVNIAQNTAWRINKKVLDVANTITQWKHCPVRDIPAMDRGEMPARPLDIDTNEIALKAWKKEASAFYRKDKARVSRRLSMEFMLSQANKFANYEAIWFPQNMDWRGRVYAVPMFNPQGNDMTKGLLTFAQEKPIGEDGFYWLKIHGANTAGVDKVPFPQRIKFVEDNHTNIMECAKAPLENTWWAEQDSPFCFLAFCFEYAGVINSGLSYNCSLPLAWDGSCSGLQHFSAMLRDEIGGKAVNLLPSAEYQDIYRIVSDKVNEMLKQDLINGTSTTVETVTDKKTGEITQRTKYGTKVMAQWWLEHGVNRGVTKRSVMTLVYGALEFGFRDQVLSDTIQKAIDNGKGDMFLNPNQAAGYMAKLIWNAVSGTVVAAVEAMNWLKSAAKLLAAEVKDRKTDTVLRGRCAVHWVTPDGFPVWQEYKKPIQTRLNLMFLGQFRLQPTINTNKDSEIDVRKQVSGIAPNFVHSLDGNHLRMTVVWAHEKYGIESFALIHDSFGTIPADAANLFKAVRETFVDTYESCDVLADFYDQIADQLHESQRDKMPALPAKGNLNLRDILKSDFAFA

SEQ ID NO: 1885 - DNA, 2670 bp, synthetic construct
  misc_feature 1..2670: note = Variant of RNA polymerase
  source 1..2670: mol_type = other DNA
atgcaccatcaccatcaccatatgaacacgattaacattgctaagaacgacttctctgacatcgaactggctgctatcccgttcaacactctggctgaccattacggtgagcgtttagctcgcgaacagttggcccttgagcatgagtcttacgagatgggtgaagcacgcttccgcaagatgtttgagcgtcaacttaaagctggtgaggttgcggataacgctgccgccaagcctctcatcactaccctactccctaagatgattgcacgcatcaacgactggtttgaggaagtgaaacgcaagcgcggcaagcgcccgacagccttccagttcctgcaagaaatcaagccggaagccgtagcgtacatcaccattaagaccactctggctatcctaaccagtgcggacaatacaaccgttcaggctgtagcaagcgcaatcggtcgcgccattgaggacgaggctcgcttcggtcgtatccgtgaccttgaagctaagcacttcaagaagaacgttgaggaacaactcaacaagcgcgtagggcacgtctacaagaaagcatttatgcaagttgtcgagcacgacatgctctctaagggtctactcgggggcggggcatgggaatcgtggcataaggaagactctattcatgtaggagtacgctgcatcgagatgctcattgagtcaaccggaatggttagcttacaccgccaaaatgctggcgtagtaggtcaagactctgagcgtatcgaactcgcacctgaatacgctgaggctatcgcaacccgtgcaggtgcgctggctggcatctctccgatgttccaaccttgcgtagttcctcctaagccgtggactggcattactggtggtggctattgggctgcggggcgcaaacccctgcagttagtacgtactcgcagtctggcggcacttcgccgctatgaagaagtgtcgatgccggaggtcatcaaagcagtcaacattgcgcagaatacagcatggcgtattaacaagaaagttctcgacgtagcgaataccatcacccaatggaaacactgtccagtcgcagatatccctgcgatggatcgtggcgaaatgccagctcgtccgttggacatcgataccaacgagattgcacttaaagcgtggaagaaagaagcttccgcgttctaccgcaaagacaaagcacgcgttagccgtcgtctgtcaatggagtttatgttatctcaggcgaacaagtttgcgaattatgaggcaatctggtttccgcaaaacatggattggcgtgggcgcgtgtacgctgtcccgatgttcaatcctcagggcaacgatatgacgaaaggcctgctgacctttgcgcaggagaaacccattggtgaagacggcttctattggctcaagattcatggcgcaaatacagctggagtggataaagtaccgtttccacaacgcatcaaatttgttgaggataaccatacgaatattatggaatgcgcgaaagcaccgctggaaaacacttggtgggcggaacaggactcgccgttctgctttctggcgttctgctttgagtatgctggcgtcatcaatagtggtctgtcgtacaactgtagcttgcctctggcatgggatggtagttgctccggcctgcaacatttctcagcgatgttacgcgacgaaattggcggcaaagctgtgaatctcctcccatctgcggaataccaggatatttatcgtatcgtcagcgacaaagttaacgagatgctgaaacaagatctgattaacggtacctctaccaccgtggaaacggtgactgataagaagacaggcgaaattacccaacgcacgaaatacgggaccaaagttatggcacagtggtggttagaacacggtgtgaatcgtggcgtcacgaaacgctcggttatgactttggtgtatggggcgctggagtttggattccgcgatcaagtgctgagtgacaccattcaaaaagcgatcgataacggcaagggtgacatgtttctgaatccgaatcaggctgctggttacatggcgaaactgatctggaacgcagtgtccgggaccgtagtcgcagcagttgaggcgatgaactggctgaaaagtgcggcgaaattacttgctgctgaagtgaaggatcgtaagacggatacagttctgcgtggccgctgcgcagtacattgggtgactcccgacggcttccctgtgtggcaggaatacaagaagcctattcagacgcgcttgaacctgatgttcctcggtcagttccgcttacagcctaccattaacaccaacaaagatagcgagattgatgtgcgcaaacaggtgtctggtatcgctcctaactttgtacacagcctggacggtaaccaccttcgtatgactgtagtgtgggcacacgagaagtacggaatcgaatcttttgcactgattcacgactccttcggtaccattccggctgacgctgcgaacctgttcaaagcagtgcgcgaaactttcgttgacacatatgagtcttgtgatgtactggctgatttctacgaccagattgctgaccagttgcacgagtctcaacgcgacaaaatgccagcacttccggctaaaggtaacttgaacctccgtgacatcttaaaatcggacttcgcgttcgcg

SEQ ID NO: 1886 - protein, 890 aa, synthetic construct
  REGION 1..890: note = Variant of RNA polymerase
MHHHHHHMNTINIAKNDFSDIELAAIPFNTLADHYGERLAREQLALEHESYEMGEARFRKMFERQLKAGEVADNAAAKPLITTLLPKMIARINDWFEEVKRKRGKRPTAFQFLQEIKPEAVAYITIKTTLAILTSADNTTVQAVASAIGRAIEDEARFGRIRDLEAKHFKKNVEEQLNKRVGHVYKKAFMQVVEHDMLSKGLLGGGAWESWHKEDSIHVGVRCIEMLIESTGMVSLHRQNAGVVGQDSERIELAPEYAEAIATRAGALAGISPMFQPCVVPPKPWTGITGGGYWAAGRKPLQLVRTRSLAALRRYEEVSMPEVIKAVNIAQNTAWRINKKVLDVANTITQWKHCPVADIPAMDRGEMPARPLDIDTNEIALKAWKKEASAFYRKDKARVSRRLSMEFMLSQANKFANYEAIWFPQNMDWRGRVYAVPMFNPQGNDMTKGLLTFAQEKPIGEDGFYWLKIHGANTAGVDKVPFPQRIKFVEDNHTNIMECAKAPLENTWWAEQDSPFCFLAFCFEYAGVINSGLSYNCSLPLAWDGSCSGLQHFSAMLRDEIGGKAVNLLPSAEYQDIYRIVSDKVNEMLKQDLINGTSTTVETVTDKKTGEITQRTKYGTKVMAQWWLEHGVNRGVTKRSVMTLVYGALEFGFRDQVLSDTIQKAIDNGKGDMFLNPNQAAGYMAKLIWNAVSGTVVAAVEAMNWLKSAAKLLAAEVKDRKTDTVLRGRCAVHWVTPDGFPVWQEYKKPIQTRLNLMFLGQFRLQPTINTNKDSEIDVRKQVSGIAPNFVHSLDGNHLRMTVVWAHEKYGIESFALIHDSFGTIPADAANLFKAVRETFVDTYESCDVLADFYDQIADQLHESQRDKMPALPAKGNLNLRDILKSDFAFA

SEQ ID NO: 1887 - DNA, 2670 bp, synthetic construct
  misc_feature 1..2670: note = Variant of RNA polymerase
  source 1..2670: mol_type = other DNA
atgcaccatcaccatcaccatatgaacacgattaacattgctaagaacgacttctctgacatcgaactggctgctatcccgttcaacactctggctgaccattacggtgagcgtttagctcgcgaacagttggcccttgagcatgagtcttacgagatgggtgaagcacgcttccgcaagatgtttgagcgtcaacttaaagctggtgaggttgcggataacgctgccgccaagcctctcatcactaccctactccctaagatgattgcacgcatcaacgactggtttgaggaagtgaaagccaagcgcggcaagcgcccgacagccttccagttcctgcaagaaatcaagccggaagccgtagcgtacatcaccattaagaccactctggctatcctaaccagtgcggacaatacaaccgttcaggctgtagcaagcgcaatcggtcgcgccattgaggacgaggctcgcttcggtcgtatccgtgaccttgaagctaagcacttcaagaagaacgttgaggaacaactcaacaagcgcgtagggcacgtctacaagaaagcatttatgcaagttgtcgagcacgacatgctctctaagggtctactcgagggcgtggcatggtcgtcgtggcataaggaagactctattcatgtaggagtacgctgcatcgagatgctcattgagtcaaccggaatggttagcttacaccgccaaaatgctggcgtagtaggtcaagactctgagcgtatcgaactcgcacctgaatacgctgaggctatcgcaacccgtgcaggtgcgctggctggcatctctccgatgttccaaccttgcgtagttcctcctaagccgtggactggcattactggtggtggctattgggctgcggggcgcaaacccctgcagttagtacgtactcgcagtctggcggcgcttcgccgctatgaagaagtgtcgatgccggaggtcatcaaagcagtcaacattgcgcagaatacagcatggcgtattaacaagaaagttctcgacgtagcgaataccatcacccaatggaaacactgtccagtccgcgatatccctgcgatggatcgtggcgaaatgccagctcgtccgttggacatcgataccaacgagattgcacttaaagcgtggaagaaagaagcttccgcgttctaccgcaaagacaaagcacgcgttagccgtcgtctgtcaatggagtttatgttatctcaggcgaacaagtttgcgaattatgaggcaatctggtttccgcaaaacatggattggcgtgggcgcgtgtacgctgtcccgatgttcaatcctcagggcaacgatatgacgaaaggcctgctgacctttgcgcaggagaaacccattggtgaagacggcttctattggctcaagattcatggcgcaaatacagctggagtggataaagtaccgtttccacaacgcatcaaatttgttgaggataaccatacgaatattatggaatgcgcgaaagcaccgctggaaaacacttggtgggcggaacaggactcgccgttctgctttctggcgttctgctttgagtatgctggcgtcatcaatagtggtctgtcgtacaactgtagcttgcctctggcattcgatggtagttgctccggcctgcaacatttctcagcgatgttacgcgacgaaattggcggcaaagctgtgaatctcctcccatctgcggaataccaggatatttatcgtatcgtcagcgacaaagttaacgagatgctgaaacaagatctgattaacggtacctctaccaccgtggaaacggtgactgataagaagacaggcgaaattacccaacgcacgaaatacgggaccaaagttatggcacagtggtggttagaacacggtgtgaatcgtggcgtcacgaaacgctcggttatgactttggtgtatggggcgctggagtttggattccgcgatcaagtgctgagtgacaccattcaaaaagcgatcgataacggcaagggtgacatgtttctgaatccgaatcaggctgctggttacatggcgaaactgatctggaacgcagtgtccgggaccgtagtcgcagcagttgaggcgatgaactggctgaaaagtgcggcgaaattacttgctgctgaagtgaaggatcgtaagacggatacagttctgcgtggccgctgcgcagtacattgggtgactcccgacggcttccctgtgtggcaggaatacaagaagcctattcagacgcgcttgaacctgatgttcctcggtcagttccgcttacagcctaccattaacaccaacaaagatagcgagattgatgtgcgcaaacaggtgtctggtatcgctcctaactttgtacacagcctggacggtaaccaccttcgtatgactgtagtgtgggcacacgagaagtacggaatcgaatcttttgcactgattcacgactccttcggtaccattccggctgacgctgcgaacctgttcaaagcagtgcgcgaaactttcgttgacacatatgagtcttgtgatgtactggctgatttctacgaccagattgctgaccagttgcacgagtctcaacgcgacaaaatgccagcacttccggctaaaggtaacttgaacctccgtgacatcttaaaatcggacttcgcgttcgcg

SEQ ID NO: 1888 - protein, 890 aa, synthetic construct
  REGION 1..890: note = Variant of RNA polymerase
MHHHHHHMNTINIAKNDFSDIELAAIPFNTLADHYGERLAREQLALEHESYEMGEARFRKMFERQLKAGEVADNAAAKPLITTLLPKMIARINDWFEEVKAKRGKRPTAFQFLQEIKPEAVAYITIKTTLAILTSADNTTVQAVASAIGRAIEDEARFGRIRDLEAKHFKKNVEEQLNKRVGHVYKKAFMQVVEHDMLSKGLLEGVAWSSWHKEDSIHVGVRCIEMLIESTGMVSLHRQNAGVVGQDSERIELAPEYAEAIATRAGALAGISPMFQPCVVPPKPWTGITGGGYWAAGRKPLQLVRTRSLAALRRYEEVSMPEVIKAVNIAQNTAWRINKKVLDVANTITQWKHCPVRDIPAMDRGEMPARPLDIDTNEIALKAWKKEASAFYRKDKARVSRRLSMEFMLSQANKFANYEAIWFPQNMDWRGRVYAVPMFNPQGNDMTKGLLTFAQEKPIGEDGFYWLKIHGANTAGVDKVPFPQRIKFVEDNHTNIMECAKAPLENTWWAEQDSPFCFLAFCFEYAGVINSGLSYNCSLPLAFDGSCSGLQHFSAMLRDEIGGKAVNLLPSAEYQDIYRIVSDKVNEMLKQDLINGTSTTVETVTDKKTGEITQRTKYGTKVMAQWWLEHGVNRGVTKRSVMTLVYGALEFGFRDQVLSDTIQKAIDNGKGDMFLNPNQAAGYMAKLIWNAVSGTVVAAVEAMNWLKSAAKLLAAEVKDRKTDTVLRGRCAVHWVTPDGFPVWQEYKKPIQTRLNLMFLGQFRLQPTINTNKDSEIDVRKQVSGIAPNFVHSLDGNHLRMTVVWAHEKYGIESFALIHDSFGTIPADAANLFKAVRETFVDTYESCDVLADFYDQIADQLHESQRDKMPALPAKGNLNLRDILKSDFAFA

SEQ ID NO: 1889 - DNA, 2670 bp, synthetic construct
  misc_feature 1..2670: note = Variant of RNA polymerase
  source 1..2670: mol_type = other DNA
atgcaccatcaccatcaccatatgaacacgattaacattgctaagaacgacttctctgacatcgaactggctgctatcccgttcaacactctggctgaccattacggtgagcgtttagctcgcgaacagttggcccttgagcatgagtcttacgagatgggtgaagcacgcttccgcaagatgtttgagcgtcaacttaaagctggtgaggttgcggataacgctgccgccaagcctctcatcactaccctactccctaagatgattgcacgcatcaacgactggtttgaggaagtgaaagccaagcgcggcaagcgcccgacagccttccagttcctgcaagaaatcaagccggaagccgtagcgtacatcaccattaagaccgtgctggctctgctaaccagtgcggacaatacaaccgttcaggctgtagcaagcgcaatcggtaaagccattgaggacgaggctcgcttcggtcgtatccgtgaccttgaagctaagcacttcaagaagaacgttgaggaacaactcaacaagcgcgtagggcacgtctacaagaaagcatttatgcaagttgtcgagcacgacatgctctctaagggtctactcgggggcggggtatgggaatcgtggcataaggaagactctattcatgtaggagtacgctgcatcgagatgctcattgagtcaaccggaatggttagcttacaccgccaaaatgctggcgtagtaggtcaagactctgagcgtatcgaactcgcacctgaatacgctgaggctatcgcaacccgtgcaggtgcgctggctggcatctctccgatgttccaaccttgcgtagttcctcctaagccgtggactggcattactggtggtggctattgggctgcggggcgcaaacccctgcagttagtacgtactcgcagtctggcggcgcttcgccgctatgaagaagtgtcgatgccggaggtcatcaaagcagtcaacattgcgcagaatacagcatggcgtattaacaagaaagttctcgacgtagcgaataccatcacccaatggaaacactgtccagtcgcagatatccctgcgatggatcgtggcgaaatgccagctcgtccgttggacatcgataccaacgagattgcacttaaagcgtggaagaaagaagcttccgcgttctaccgcaaagacaaagcacgcgttagccgtcgtctgtcaatggagtttatgttatctcaggcgaacaagtttgcgaattatgaggcaatctggtttccgcaaaacatggattggcgtgggcgcgtgtacgctgtcccgatgttcaatcctcagggcaacgatatgacgaaaggcctgctgacctttgcgcaggagaaacccattggtgaagacggcttctattggctcaagattcatggcgcaaatacagctggagtggataaagtaccgtttccacaacgcatcaaatttgttgaggataaccatacgaatattatggaatgcgcgaaagcaccgctggaaaacacttggtgggcggaacaggactcgccgttctgctttctggcgttctgctttgagtatgctggcgtcatcaatagtggtctgtcgtacaactgtagcttgcctctggcatgggatggtagttgctccggcctgcaacatttctcagcgatgttacgcgacgaaattggcggcaaagctgtgaatctcctcccatctgcggaataccaggatatttatcgtatcgtcagcgacaaagttaacgagatgctgaaacaagatctgattaacggtacctctaccaccgtggaaacggtgactgataagaagacaggcgaaattacccaacgcacgaaatacgggaccaaagttatggcacagtggtggttagaacacggtgtgaatcgtggcgtcacgaaacgctcggttatgactttggtgtatggggcgctggagtttggattccgcgatcaagtgctgagtgacaccattcaaaaagcgatcgataacggcaagggtgacatgtttctgaatccgaatcaggctgctggttacatggcgaaactgatctggaacgcagtgtccgggaccgtagtcgcagcagttgaggcgatgaactggctgaaaagtgcggcgaaattacttgctgctgaagtgaaggatcgtaagacggatacagttctgcgtggccgctgcgcagtacattgggtgactcccgacggcttccctgtgtggcaggaatacaagaagcctattcagacgcgcttgaacctgatgttcctcggtcagttccgcttacagcctaccattaacaccaacaaagatagcgagattgatgcgcgcaaacaggtgtctggtatcgctcctaactttgtacacagcctggacggtaaccaccttcgtatgactgtagtgtgggcacacgagaagtacggaatcgaatcttttgcactgattcacgactccttcggtaccattccggctgacgctgcgaacctgttcaaagcagtgcgcgaaactttcgttgacacatatgagtcttgtgatgtactggctgatttctacgaccagattgctgaccagttgcacgagtctcaacgcgacaaaatgccagcacttccggctaaaggtaacttgaacctccgtgacatcttaaaatcggacttcgcgttcgcg

SEQ ID NO: 1890 - protein, 890 aa, synthetic construct
  REGION 1..890: note = Variant of RNA polymerase
MHHHHHHMNTINIAKNDFSDIELAAIPFNTLADHYGERLAREQLALEHESYEMGEARFRKMFERQLKAGEVADNAAAKPLITTLLPKMIARINDWFEEVKAKRGKRPTAFQFLQEIKPEAVAYITIKTVLALLTSADNTTVQAVASAIGKAIEDEARFGRIRDLEAKHFKKNVEEQLNKRVGHVYKKAFMQVVEHDMLSKGLLGGGVWESWHKEDSIHVGVRCIEMLIESTGMVSLHRQNAGVVGQDSERIELAPEYAEAIATRAGALAGISPMFQPCVVPPKPWTGITGGGYWAAGRKPLQLVRTRSLAALRRYEEVSMPEVIKAVNIAQNTAWRINKKVLDVANTITQWKHCPVADIPAMDRGEMPARPLDIDTNEIALKAWKKEASAFYRKDKARVSRRLSMEFMLSQANKFANYEAIWFPQNMDWRGRVYAVPMFNPQGNDMTKGLLTFAQEKPIGEDGFYWLKIHGANTAGVDKVPFPQRIKFVEDNHTNIMECAKAPLENTWWAEQDSPFCFLAFCFEYAGVINSGLSYNCSLPLAWDGSCSGLQHFSAMLRDEIGGKAVNLLPSAEYQDIYRIVSDKVNEMLKQDLINGTSTTVETVTDKKTGEITQRTKYGTKVMAQWWLEHGVNRGVTKRSVMTLVYGALEFGFRDQVLSDTIQKAIDNGKGDMFLNPNQAAGYMAKLIWNAVSGTVVAAVEAMNWLKSAAKLLAAEVKDRKTDTVLRGRCAVHWVTPDGFPVWQEYKKPIQTRLNLMFLGQFRLQPTINTNKDSEIDARKQVSGIAPNFVHSLDGNHLRMTVVWAHEKYGIESFALIHDSFGTIPADAANLFKAVRETFVDTYESCDVLADFYDQIADQLHESQRDKMPALPAKGNLNLRDILKSDFAFA

SEQ ID NO: 1891 - DNA, 2670 bp, synthetic construct
  misc_feature 1..2670: note = Variant of RNA polymerase
  source 1..2670: mol_type = other DNA
atgcaccatcaccatcaccatatgaacacgattaacattgctaagaacgacttctctgacatcgaactggctgctatcccgttcaacactctggctgaccattacggtgagcgtttagctcgcgaacagttggcccttgagcatgagtcttacgagatgggtgaagcacgcttccgcaagatgtttgagcgtcaacttaaagctggtgaggttgcggataacgctgccgccaagcctctcatcactaccctactccctaagatgattgcacgcatcaacgactggtttgaggaagtgaaagctaagcgcggcaagcgcccgacagccttccagttcctgcaagaaatcaagccggaagccgtagcgtacatcaccattaagaccactctggcttgcctaaccagtgcggacaatctgactgttcaggctctggcaagcgcaatcggtcgggccattgaggacgaggctcgcttcggtcgtatccgtgaccttgaagctaagcacttcaagaagaacgttgaggaacaactcaacaagcgcgtagggcacgtctacaagaaagcatttatgcaagttgtcgagcacgacatgctctctaagggtctactcggtggcgaggcgtggtcttcgtggcataaggaagactctattcatgtaggagtacgctgcatcgagatgctcattgagtcaaccggaatggttagcttacaccgccaaaatgctggcgtagtaggtcaagactctgagcgtatcgaactcgcacctgaatacgctgaggctatcgcaacccgtgcaggtgcgctggctggcatctctccgatgttccaaccttgcgtagttcctcctaagccgtggactggcattactggtggtggctattgggctgcggggcgcaaacccctgcagttagtacgtactcgcagtctggcggcgcttcgccgctatgaagaagtgtcgatgccggaggtcatcaaagcagtcaacattgcgcagaatacagcatggcgtattaacaagaaagttctcgacgtagcgaataccatcacccaatggaaacactgtccagtcgctgatatccctgcgatggatcgtggcgaaatgccagctcgtccgttggacatcgataccaacgagattgcacttaaagcgtggaagaaagaagcttccgcgttctaccgcaaagacaaagcacgcgttagccgtcgtctgtcaatggagtttatgttatctcaggcgaacaagtttgcgaattatgaggcaatctggtttccgcaaaacatggattggcgtgggcgcgtgtacgctgtcccgatgttcaatcctcagggcaacgatatgacgaaaggcctgctgacctttgcgcaggagaaacccattggtgaagacggcttctattggctcaagattcatggcgcaaatacagctggagtggataaagtaccgtttccacaacgcatcaaatttgttgaggataaccatacgaatattatggaatgcgcgaaagcaccgctggaaaacacttggtgggcggaacaggactcgccgttctgctttctggcgttctgctttgagtatgctggcgtcatcaatagtggtctgtcgtacaactgtagcttgcctctggcatttgatggtagttgctccggcctgcaacatttctcagcgatgttacgcgacgaaattggcggcaaagctgtgaatctcctcccatctgcggaataccaggatatttatcgtatcgtcagcgacaaagttaacgagatgctgaaacaagatctgattaacggtacctctaccaccgtggaaacggtgactgataagaagacaggcgaaattacccaacgcacgaaatacgggaccaaagttatggcacagtggtggttagaacacggtgtgaatcgtggcgtcacgaaacgctcggttatgactttggtgtatggggcgctggagtttggattccgcgatcaagtgctgaaggacaccgtcgggaaagcgatcgataacggcaagggtgacatgtttctgaatccgaatcaggctgctggttacatggcgaaactgatctggaacgcagtgtccgggaccgtagtcgcagcagttgaggcgatgaactggctgaaaagtgcggcgaaattacttgctgctgaagtgaaggatcgtaagacggatacagttctgcgtggccgctgcgcagtacattgggtgactcccgacggcttccctgtgtggcaggaatacaagaagcctattcagacgcgcttgaacctgatgttcctcggtcagttccgcttacagcctaccattaacaccaacaaagatagcgagattgatgcacgcaaacaggcttctggtatcgctcctaactttgtacacagctttgacgggaaccaccttcgtatgactgtagtgtgggcacacgagaagtacggaatcgaatcttttgcactgattcacgactccttcggtaccattccggctgacgctgcgaacctgttcaaagcagtgcgcgaaactttcgttgacacatatgagtcttgtgatgtactggctgatttctacgaccagattgctgaccagttgcacgagtctcaacgcgacaaaatgccagcacttccggctaaaggtaacttgaacctccgtgacatcttaaaatcggacttcgcgttcgcg

SEQ ID NO: 1892 - protein, 890 aa, synthetic construct
  REGION 1..890: note = Variant of RNA polymerase
MHHHHHHMNTINIAKNDFSDIELAAIPFNTLADHYGERLAREQLALEHESYEMGEARFRKMFERQLKAGEVADNAAAKPLITTLLPKMIARINDWFEEVKAKRGKRPTAFQFLQEIKPEAVAYITIKTTLACLTSADNLTVQALASAIGRAIEDEARFGRIRDLEAKHFKKNVEEQLNKRVGHVYKKAFMQVVEHDMLSKGLLGGEAWSSWHKEDSIHVGVRCIEMLIESTGMVSLHRQNAGVVGQDSERIELAPEYAEAIATRAGALAGISPMFQPCVVPPKPWTGITGGGYWAAGRKPLQLVRTRSLAALRRYEEVSMPEVIKAVNIAQNTAWRINKKVLDVANTITQWKHCPVADIPAMDRGEMPARPLDIDTNEIALKAWKKEASAFYRKDKARVSRRLSMEFMLSQANKFANYEAIWFPQNMDWRGRVYAVPMFNPQGNDMTKGLLTFAQEKPIGEDGFYWLKIHGANTAGVDKVPFPQRIKFVEDNHTNIMECAKAPLENTWWAEQDSPFCFLAFCFEYAGVINSGLSYNCSLPLAFDGSCSGLQHFSAMLRDEIGGKAVNLLPSAEYQDIYRIVSDKVNEMLKQDLINGTSTTVETVTDKKTGEITQRTKYGTKVMAQWWLEHGVNRGVTKRSVMTLVYGALEFGFRDQVLKDTVGKAIDNGKGDMFLNPNQAAGYMAKLIWNAVSGTVVAAVEAMNWLKSAAKLLAAEVKDRKTDTVLRGRCAVHWVTPDGFPVWQEYKKPIQTRLNLMFLGQFRLQPTINTNKDSEIDARKQASGIAPNFVHSFDGNHLRMTVVWAHEKYGIESFALIHDSFGTIPADAANLFKAVRETFVDTYESCDVLADFYDQIADQLHESQRDKMPALPAKGNLNLRDILKSDFAFA

SEQ ID NO: 1893 - DNA, 2670 bp, synthetic construct
  misc_feature 1..2670: note = Variant of RNA polymerase
  source 1..2670: mol_type = other DNA
atgcaccatcaccatcaccatatgaacacgattaacattgctaagaacgacttctctgacatcgaactggctgctatcccgttcaacactctggctgaccattacggtgagcgtttagctcgcgaacagttggcccttgagcatgagtcttacgagatgggtgaagcacgcttccgcaagatgtttgagcgtcaacttaaagctggtgaggttgcggataacgctgccgccaagcctctcatcactaccctactccctaagatgattgcacgcatcaacgactggtttgaggaagtgaaagctaagcgcggcaagcgcccgacagccttccagttcctgcaagaaatcaagccggaagccgtagcgtacatcaccattaagaccactctggcttgcctaaccagtgcggacaatacaaccgttcaggctgtagcaagcgcaatcggtcgggccattgaggacgaggctcgcttcggtcgtatccgtgaccttgaagctaagcacttcaagaagaacgttgaggaacaactcaacaagcgcgtagggcacgtctacaagaaagcatttatgcaagttgtcgagcacgacatgctctctaagggtctactcggtggcgaggcgtggtcttcgtggcataaggaagactctattcatgtaggagtacgctgcatcgagatgctcattgagtcaaccggaatggttagcttacaccgccaaaatgctggcgtagtaggtcaagactctgagcgtatcgaactcgcacctgaatacgctgaggctatcgcaacccgtgcaggtgcgctggctggcatctctccgatgttccaaccttgcgtagttcctcctaagccgtggactggcattactggtggtggctattgggctgcggggcgcaaacccctgcagttagtacgtactcgcagtctggcggcgcttcgccgctatgaagaagtgtcgatgccggaggtcatcaaagcagtcaacattgcgcagaatacagcatggcgtattaacaagaaagttctcgacgtagcgaataccatcacccaatggaaacactgtccagtccgcgatatccctgcgatggatcgtggcgaaatgccagctcgtccgttggacatcgataccaacgagattgcacttaaagcgtggaagaaagaagcttccgcgttctaccgcaaagacaaagcacgcgttagccgtcgtctgtcaatggagtttatgttatctcaggcgaacaagtttgcgaattatgaggcaatctggtttccgcaaaacatggattggcgtgggcgcgtgtacgctgtcccgatgttcaatcctcagggcaacgatatgacgaaaggcctgctgacctttgcgcaggagaaacccattggtgaagacggcttctattggctcaagattcatggcgcaaatacagctggagtggataaagtaccgtttccacaacgcatcaaatttgttgaggataaccatacgaatattatggaatgcgcgaaagcaccgctggaaaacacttggtgggcggaacaggactcgccgttctgctttctggcgttctgctttgagtatgctggcgtcatcaatagtggtctgtcgtacaactgtagcttgcctctggcattcgatggtagttgctccggcctgcaacatttctcagcgatgttacgcgacgaaattggcggcaaagctgtgaatctcctcccatctgcggaataccaggatatttatcgtatcgtcagcgacaaagttaacgagatgctgaaacaagatctgattaacggtacctctaccaccgtggaaacggtgactgataagaagacaggcgaaattacccaacgcacgaaatacgggaccaaagttatggcacagtggtggttagaacacggtgtgaatcgtggcgtcacgaaacgctcggttatgactttggtgtatggggcgctggagtttggattccgcgatcaagtgctgagtgacaccattcaaaaagcgatcgataacggcaagggtgacatgtttctgaatccgaatcaggctgctggttacatggcgaaactgatctggaacgcagtgtccgggaccgtagtcgcagcagttgaggcgatgaactggctgaaaagtgcggcgaaattacttgctgctgaagtgaaggatcgtaagacggatacagttctgcgtggccgctgcgcagtacattgggtgactcccgacggcttccctgtgtggcaggaatacaagaagcctattcagacgcgcttgaacctgatgttcctcggtcagttccgcttacagcctaccattaacaccaacaaagatagcgagattgatgtgcgcaaacaggtgtctggtatcgctcctaactttgtacacagcctggacggtaaccaccttcgtatgactgtagtgtgggcacacgagaagtacggaatcgaatcttttgcactgattcacgactccttcggtaccattccggctgacgctgcgaacctgttcaaagcagtgcgcgaaactttcgttgacacatatgagtcttgtgatgtactggctgatttctacgaccagattgctgaccagttgcacgagtctcaacgcgacaaaatgccagcacttccggctaaaggtaacttgaacctccgtgacatcttaaaatcggacttcgcgttcgcg

SEQ ID NO: 1894 - protein, 890 aa, synthetic construct
  REGION 1..890: note = Variant of RNA polymerase
MHHHHHHMNTINIAKNDFSDIELAAIPFNTLADHYGERLAREQLALEHESYEMGEARFRKMFERQLKAGEVADNAAAKPLITTLLPKMIARINDWFEEVKAKRGKRPTAFQFLQEIKPEAVAYITIKTTLACLTSADNTTVQAVASAIGRAIEDEARFGRIRDLEAKHFKKNVEEQLNKRVGHVYKKAFMQVVEHDMLSKGLLGGEAWSSWHKEDSIHVGVRCIEMLIESTGMVSLHRQNAGVVGQDSERIELAPEYAEAIATRAGALAGISPMFQPCVVPPKPWTGITGGGYWAAGRKPLQLVRTRSLAALRRYEEVSMPEVIKAVNIAQNTAWRINKKVLDVANTITQWKHCPVRDIPAMDRGEMPARPLDIDTNEIALKAWKKEASAFYRKDKARVSRRLSMEFMLSQANKFANYEAIWFPQNMDWRGRVYAVPMFNPQGNDMTKGLLTFAQEKPIGEDGFYWLKIHGANTAGVDKVPFPQRIKFVEDNHTNIMECAKAPLENTWWAEQDSPFCFLAFCFEYAGVINSGLSYNCSLPLAFDGSCSGLQHFSAMLRDEIGGKAVNLLPSAEYQDIYRIVSDKVNEMLKQDLINGTSTTVETVTDKKTGEITQRTKYGTKVMAQWWLEHGVNRGVTKRSVMTLVYGALEFGFRDQVLSDTIQKAIDNGKGDMFLNPNQAAGYMAKLIWNAVSGTVVAAVEAMNWLKSAAKLLAAEVKDRKTDTVLRGRCAVHWVTPDGFPVWQEYKKPIQTRLNLMFLGQFRLQPTINTNKDSEIDVRKQVSGIAPNFVHSLDGNHLRMTVVWAHEKYGIESFALIHDSFGTIPADAANLFKAVRETFVDTYESCDVLADFYDQIADQLHESQRDKMPALPAKGNLNLRDILKSDFAFA

SEQ ID NO: 1895 - DNA, 2670 bp, synthetic construct
  misc_feature 1..2670: note = Variant of RNA polymerase
  source 1..2670: mol_type = other DNA
atgcaccatcaccatcaccatatgaacacgattaacattgctaagaacgacttctctgacatcgaactggctgctatcccgttcaacactctggctgaccattacggtgagcgtttagctcgcgaacagttggcccttgagcatgagtcttacgagatgggtgaagcacgcttccgcaagatgtttgagcgtcaacttaaagctggtgaggttgcggataacgctgccgccaagcctctcatcactaccctactccctaagatgattgcacgcatcaacgactggtttgaggaagtgaaagctaagcgcggcaagcgcccgacagccttccagttcctgcaagaaatcaagccggaagccgtagcgtacatcaccattaagaccactctggcttgcctaaccagtgcggacaatctgagtgttcaggctgtggcaagcgcaatcggtcgggccattgaggacgaggctcgcttcggtcgtatccgtgaccttgaagctaagcacttcaagaagaacgttgaggaacaactcaacaagcgcgtagggcacgtctacaagaaagcatttatgcaagttgtcgagcacgacatgctctctaagggtctactcggtggcggggcgtggtctatgtggcataaggaagactctattcatgtaggagtacgctgcatcgagatgctcattgagtcaaccggaatggttagcttacaccgccaaaatgctggcgtagtaggtcaagactctgagcgtatcgaactcgcacctgaatacgctgaggctatcgcaacccgtgcaggtgcgctggctggcatctctccgatgttccaaccttgcgtagttcctcctaagccgtggactggcattactggtggtggctattgggctgcggggcgcaaacccctgcagttagtacgtactcgcagtctggcggcgcttcgccgctatgaagaagtgtcgatgccggaggtcatcaaagcagtcaacattgcgcagaatacagcatggcgtattaacaagaaagttctcgacgtagcgaataccatcacccaatggaaacactgtccagtcgctgatatccctgcgatggatcgtggcgaaatgccagctcgtccgttggacatcgataccaacgagattgcacttaaagcgtggaagaaagaagcttccgcgttctaccgcaaagacaaagcacgcgttagccgtcgtctgtcaatggagtttatgttatctcaggcgaacaagtttgcgaattatgaggcaatctggtttccgcaaaacatggattggcgtgggcgcgtgtacgctgtcccgatgttcaatcctcagggcaacgatatgacgaaaggcctgctgacctttgcgcaggagaaacccattggtgaagacggcttctattggctcaagattcatggcgcaaatacagctggagtggataaagtaccgtttccacaacgcatcaaatttgttgaggataaccatacgaatattatggaatgcgcgaaagcaccgctggaaaacacttggtgggcggaacaggactcgccgttctgctttctggcgttctgctttgagtatgctggcgtcatcaatagtggtctgtcgtacaactgtagcttgcctctggcatttgatggtagttgctccggcctgcaacatttctcagcgatgttacgcgacgaaattggcggcaaagctgtgaatctcctcccatctgcggaataccaggatatttatcgtatcgtcagcgacaaagttaacgagatgctgaaacaagatctgattaacggtacctctaccaccgtggaaacggtgactgataagaagacaggcgaaattacccaacgcacgaaatacgggaccaaagttatggcacagtggtggttagaacacggtgtgactcgtggcgtcacgaaacgctcggttatgactttggtgtatggggcgctggagtttggattccgcgatcaagtgctgaaggacaccatcgggaaagcgatcgataacggcaagggtgacatgtttctgaatccgaatcaggctgctggttacatggcgaaactgatctggaacgcagtgtccgggaccgtagtcgcagcagttgaggcgatgaactggctgaaaagtgcggcgaaattacttgctgctgaagtgaaggatcgtaagacggatacagttctgcgtggccgctgcgcagtacattgggtgactcccgacggcttccctgtgtggcaggaatacaagaagcctattcagacgcgcttgaacctgatgttcctcggtcagttccgcttacagcctaccattaacaccaacaaagatagcgagattgatgcacgcaaacaggtgtctggtatcgctcctaactttgtacacagcctggacggtaaccaccttcgtatgactgtagtgtgggcacacgagaagtacggaatcgaatcttttgcactgattcacgactccttcggtaccattccggctgacgctgcgaacctgttcaaagcagtgcgcgaaactttcgttgacacatatgagtcttgtgatgtactggctgatttctacgaccagattgctgaccagttgcacgagtctcaacgcgacaaaatgccagcacttccggctaaaggtaacttgaacctccgtgacatcttaaaatcggacttcgcgttcgcg

SEQ ID NO: 1896 - protein, 890 aa, synthetic construct
  REGION 1..890: note = Variant of RNA polymerase
MHHHHHHMNTINIAKNDFSDIELAAIPFNTLADHYGERLAREQLALEHESYEMGEARFRKMFERQLKAGEVADNAAAKPLITTLLPKMIARINDWFEEVKAKRGKRPTAFQFLQEIKPEAVAYITIKTTLACLTSADNLSVQAVASAIGRAIEDEARFGRIRDLEAKHFKKNVEEQLNKRVGHVYKKAFMQVVEHDMLSKGLLGGGAWSMWHKEDSIHVGVRCIEMLIESTGMVSLHRQNAGVVGQDSERIELAPEYAEAIATRAGALAGISPMFQPCVVPPKPWTGITGGGYWAAGRKPLQLVRTRSLAALRRYEEVSMPEVIKAVNIAQNTAWRINKKVLDVANTITQWKHCPVADIPAMDRGEMPARPLDIDTNEIALKAWKKEASAFYRKDKARVSRRLSMEFMLSQANKFANYEAIWFPQNMDWRGRVYAVPMFNPQGNDMTKGLLTFAQEKPIGEDGFYWLKIHGANTAGVDKVPFPQRIKFVEDNHTNIMECAKAPLENTWWAEQDSPFCFLAFCFEYAGVINSGLSYNCSLPLAFDGSCSGLQHFSAMLRDEIGGKAVNLLPSAEYQDIYRIVSDKVNEMLKQDLINGTSTTVETVTDKKTGEITQRTKYGTKVMAQWWLEHGVTRGVTKRSVMTLVYGALEFGFRDQVLKDTIGKAIDNGKGDMFLNPNQAAGYMAKLIWNAVSGTVVAAVEAMNWLKSAAKLLAAEVKDRKTDTVLRGRCAVHWVTPDGFPVWQEYKKPIQTRLNLMFLGQFRLQPTINTNKDSEIDARKQVSGIAPNFVHSLDGNHLRMTVVWAHEKYGIESFALIHDSFGTIPADAANLFKAVRETFVDTYESCDVLADFYDQIADQLHESQRDKMPALPAKGNLNLRDILKSDFAFA

SEQ ID NO: 1897 - DNA, 2670 bp, synthetic construct
  misc_feature 1..2670: note = Variant of RNA polymerase
  source 1..2670: mol_type = other DNA
atgcaccatcaccatcaccatatgaacacgattaacattgctaagaacgacttctctgacatcgaactggctgctatcccgttcaacactctggctgaccattacggtgagcgtttagctcgcgaacagttggcccttgagcatgagtcttacgagatgggtgaagcacgcttccgcaagatgtttgagcgtcaacttaaagctggtgaggttgcggataacgctgccgccaagcctctcatcactaccctactccctaagatgattgcacgcatcaacgactggtttgaggaagtgaaagctaagcgcggcaagcgcccgacagccttccagttcctgcaagaaatcaagccggaagccgtagcgtacatcaccattaagaccgtgctggctagcctaaccagtgcggacaatacaaccgttcaggctgtagcaagcgcaatcggtcgggccattgaggacgaggctcgcttcggtcgtatccgtgaccttgaagctaagcacttcaagaagaacgttgaggaacaactcaacaagcgcgtagggcacgtctacaagaaagcatttatgcaagttgtcgagcacgacatgctctctaagggtctactcggtggcgaggcgtggtcttcgtggcataaggaagactctattcatgtaggagtacgctgcatcgagatgctcattgagtcaaccggaatggttactttacaccgccaaaatgctggcgtagtaggtcaagactctgagcgtatcgaactcgcacctgaatacgctgaggctatcgcaacccgtgcaggtgcgctggctggcatctctccgatgttccaaccttgcgtagttcctcctaagccgtggactggcattactggtggtggctattgggctgcggggcgcaaacccctgcagttagtacgtactcgcagtctggcggcgcttcgccgctatgaagaagtgtcgatgccggaggtcatcaaagcagtcaacattgcgcagaatacagcatggcgtattaacaagaaagttctcgacgtagcgaataccatcacccaatggaaacactgtccagtccgcgatatccctgcgatggatcgtggcgaaatgccagctcgtccgttggacatcgataccaacgagattgcacttaaagcgtggaagaaagaagcttccgcgttctaccgcaaagacaaagcacgcgttagccgtcgtctgtcaatggagtttatgttatctcaggcgaacaagtttgcgaattatgaggcaatctggtttccgcaaaacatggattggcgtgggcgcgtgtacgctgtcccgatgttcaatcctcagggcaacgatatgacgaaaggcctgctgacctttgcgcaggagaaacccattggtgaagacggcttctattggctcaagattcatggcgcaaatacagctggagtggataaagtaccgtttccacaacgcatcaaatttgttgaggataaccatacgaatattatggaatgcgcgaaagcaccgctggaaaacacttggtgggcggaacaggactcgccgttctgctttctggcgttctgctttgagtatgctggcgtcatcaatagtggtctgtcgtacaactgtagcttgcctatggcattcgatggtagttgctccggcctgcaacatttctcagcgatgttacgcgacgaaattggcggcaaagctgtgaatctcctcccatctgcggaataccaggatatttatcgtatcgtcagcgacaaagttaacgagatgctgaaacaagatctgattaacggtacctctaccaccgtggaaacggtgactgataagaagacaggcgaaattacccaacgcacgaaatacgggaccaaagttatggcacagtggtggttagaacacggtgtgaatcgtggcgtcacgaaacgctcggttatgactttggtgtatggggcgctggagtttggattccgcgatcaagtgctgagtgacaccattcaaaaagcgatcgataacggcaagggtgacatgtttctgaatccgaatcaggctgctggttacatggcgaaactgatctggaacgcagtgtccgggaccgtagtcgcagcagttgaggcgatgaactggctgaaaagtgcggcgaaattacttgctgctgaagtgaaggatcgtaagacggatacagttctgcgtggccgctgcgcagtacattgggtgactcccgacggcttccctgtgtggcaggaatacaagaagcctattcagacgcgcttgaacctgatgttcctcggtcagttccgcttacagcctaccattaacaccaacaaagatagcgagattgatgcacgcaaacaggtgtctggtatcgctcctaactttgtacacagcctggacggtaaccaccttcgtatgactgtagtgtgggcacacgagaagtacggaatcgaatcttttgcactgattcacgactccttcggtaccattccggctgacgctgcgaacctgttcaaagcagtgcgcgaaactttcgttgacacatatgagtcttgtgatgtactggctgatttctacgaccagattgctgaccagttgcacgagtctcaacgcgacaaaatgccagcacttccggctaaaggtaacttgaacctccgtgacatcttaaaatcggacttcgcgttcgcg

SEQ ID NO: 1898 - protein, 890 aa, synthetic construct
  REGION 1..890: note = Variant of RNA polymerase
MHHHHHHMNTINIAKNDFSDIELAAIPFNTLADHYGERLAREQLALEHESYEMGEARFRKMFERQLKAGEVADNAAAKPLITTLLPKMIARINDWFEEVKAKRGKRPTAFQFLQEIKPEAVAYITIKTVLASLTSADNTTVQAVASAIGRAIEDEARFGRIRDLEAKHFKKNVEEQLNKRVGHVYKKAFMQVVEHDMLSKGLLGGEAWSSWHKEDSIHVGVRCIEMLIESTGMVTLHRQNAGVVGQDSERIELAPEYAEAIATRAGALAGISPMFQPCVVPPKPWTGITGGGYWAAGRKPLQLVRTRSLAALRRYEEVSMPEVIKAVNIAQNTAWRINKKVLDVANTITQWKHCPVRDIPAMDRGEMPARPLDIDTNEIALKAWKKEASAFYRKDKARVSRRLSMEFMLSQANKFANYEAIWFPQNMDWRGRVYAVPMFNPQGNDMTKGLLTFAQEKPIGEDGFYWLKIHGANTAGVDKVPFPQRIKFVEDNHTNIMECAKAPLENTWWAEQDSPFCFLAFCFEYAGVINSGLSYNCSLPMAFDGSCSGLQHFSAMLRDEIGGKAVNLLPSAEYQDIYRIVSDKVNEMLKQDLINGTSTTVETVTDKKTGEITQRTKYGTKVMAQWWLEHGVNRGVTKRSVMTLVYGALEFGFRDQVLSDTIQKAIDNGKGDMFLNPNQAAGYMAKLIWNAVSGTVVAAVEAMNWLKSAAKLLAAEVKDRKTDTVLRGRCAVHWVTPDGFPVWQEYKKPIQTRLNLMFLGQFRLQPTINTNKDSEIDARKQVSGIAPNFVHSLDGNHLRMTVVWAHEKYGIESFALIHDSFGTIPADAANLFKAVRETFVDTYESCDVLADFYDQIADQLHESQRDKMPALPAKGNLNLRDILKSDFAFA

SEQ ID NO: 1899 - DNA, 2670 bp, synthetic construct
  misc_feature 1..2670: note = Variant of RNA polymerase
  source 1..2670: mol_type = other DNA
atgcaccatcaccatcaccatatgaacacgattaacattgctaagaacgacttctctgacatcgaactggctgctatcccgttcaacactctggctgaccattacggtgagcgtttagctcgcgaacagttggcccttgagcatgagtcttacgagatgggtgaagcacgcttccgcaagatgtttgagcgtcaacttaaagctggtgaggttgcggataacgctgccgccaagcctctcatcactaccctactccctaagatgattgcacgcatcaacgactggtttgaggaagtgaaagccaagcgcggcaagcgcccgacagccttccagttcctgcaagaaatcaagccggaagccgtagcgtacatcaccattaagaccgtgctggctgtcctaaccagtgcggacaatacaaccgttcaggctgtagcaagcgcaatcggtcgggccattgaggacgaggctcgcttcggtcgtatccgtgaccttgaagctaagcacttcaagaagaacgttgaggaacaactcaacaagcgcgtagggcacgtctacaagaaagcatttatgcaagttgtcgagcacgacatgctctctaagggtctactcggtggcgaggcgtggtcttcgtggcataaggaagactctattcatgtaggagtacgctgcatcgagatgctcattgagtcaaccggaatggttagcttacaccgccaaaatgctggcgtagtaggtcaagactctgagcgtatcgaactcgcacctgaatacgctgaggctatcgcaacccgtgcaggtgcgctggctggcatctctccgatgttccaaccttgcgtagttcctcctaagccgtggactggcattactggtggtggctattgggctgcggggcgcaaacccctgcagttagtacgtactcgcagtctggcggtacttcgccgctatgaagaagtgtcgatgccggaggtcatcaaagcagtcaacattgcgcagaatacagcatggcgtattaacaagaaagttctcgacgtagcgaataccatcacccaatggaaacactgtccagtccgcgatatccctgcgatggatcgtggcgaaatgccagctcgtccgttggacatcgataccaacgagattgcacttaaagcgtggaagaaagaagcttccgcgttctaccgcaaagacaaagcacgcgttagccgtcgtctgtcaatggagtttatgttatctcaggcgaacaagtttgcgaattatgaggcaatctggtttccgcaaaacatggattggcgtgggcgcgtgtacgctgtcccgatgttcaatcctcagggcaacgatatgacgaaaggcctgctgacctttgcgcaggagaaacccattggtgaagacggcttctattggctcaagattcatggcgcaaatacagctggagtggataaagtaccgtttccacaacgcatcaaatttgttgaggataaccatacgaatattatggaatgcgcgaaagcaccgctggaaaacacttggtgggcggaacaggactcgccgttctgctttctggcgttctgctttgagtatgctggcgtcatcaatagtggtctgtcgtacaactgtagcttgcctatggcattcgatggtagttgctccggcctgcaacatttctcagcgatgttacgcgacgaaattggcggcaaagctgtgaatctcctcccatctgcggaataccaggatatttatcgtatcgtcagcgacaaagttaacgagatgctgaaacaagatctgattaacggtacctctaccaccgtggaaacggtgactgataagaagacaggcgaaattacccaacgcacgaaatacgggaccaaagttatggcacagtggtggttagaacacggtgtgaatcgtggcgtcacgaaacgctcggttatgactttggtgtatggggcgctggagtttggattccgcgatcaagtgctgagtgacaccattcaaaaagcgatcgataacggcaagggtgacatgtttctgaatccgaatcaggctgctggttacatggcgaaactgatctggaacgcagtgtccgggaccgtagtcgcagcagttgaggcgatgaactggctgaaaagtgcggcgaaattacttgctgctgaagtgaaggatcgtaagacggatacagttctgcgtggccgctgcgcagtacattgggtgactcccgacggcttccctgtgtggcaggaatacaagaagcctattcagacgcgcttgaacctgatgttcctcggtcagttccgcttacagcctaccattaacaccaacaaagatagcgagattgatgcgcgcaaacaggtgtctggtatcgctcctaactttgtacacagcctggacggtaaccaccttcgtatgactgtagtgtgggcacacgagaagtacggaatcgaatcttttgcactgattcacgactccttcggtaccattccggctgacgctgcgaacctgttcaaagcagtgcgcgaaactttcgttgacacatatgagtcttgtgatgtactggctgatttctacgaccagattgctgaccagttgcacgagtctcaacgcgacaaaatgccagcacttccggctaaaggtaacttgaacctccgtgacatcttaaaatcggacttcgcgttcgcg

SEQ ID NO: 1900 - protein, 890 aa, synthetic construct
  REGION 1..890: note = Variant of RNA polymerase
MHHHHHHMNTINIAKNDFSDIELAAIPFNTLADHYGERLAREQLALEHESYEMGEARFRKMFERQLKAGEVADNAAAKPLITTLLPKMIARINDWFEEVKAKRGKRPTAFQFLQEIKPEAVAYITIKTVLAVLTSADNTTVQAVASAIGRAIEDEARFGRIRDLEAKHFKKNVEEQLNKRVGHVYKKAFMQVVEHDMLSKGLLGGEAWSSWHKEDSIHVGVRCIEMLIESTGMVSLHRQNAGVVGQDSERIELAPEYAEAIATRAGALAGISPMFQPCVVPPKPWTGITGGGYWAAGRKPLQLVRTRSLAVLRRYEEVSMPEVIKAVNIAQNTAWRINKKVLDVANTITQWKHCPVRDIPAMDRGEMPARPLDIDTNEIALKAWKKEASAFYRKDKARVSRRLSMEFMLSQANKFANYEAIWFPQNMDWRGRVYAVPMFNPQGNDMTKGLLTFAQEKPIGEDGFYWLKIHGANTAGVDKVPFPQRIKFVEDNHTNIMECAKAPLENTWWAEQDSPFCFLAFCFEYAGVINSGLSYNCSLPMAFDGSCSGLQHFSAMLRDEIGGKAVNLLPSAEYQDIYRIVSDKVNEMLKQDLINGTSTTVETVTDKKTGEITQRTKYGTKVMAQWWLEHGVNRGVTKRSVMTLVYGALEFGFRDQVLSDTIQKAIDNGKGDMFLNPNQAAGYMAKLIWNAVSGTVVAAVEAMNWLKSAAKLLAAEVKDRKTDTVLRGRCAVHWVTPDGFPVWQEYKKPIQTRLNLMFLGQFRLQPTINTNKDSEIDARKQVSGIAPNFVHSLDGNHLRMTVVWAHEKYGIESFALIHDSFGTIPADAANLFKAVRETFVDTYESCDVLADFYDQIADQLHESQRDKMPALPAKGNLNLRDILKSDFAFA

SEQ ID NO: 1901 - DNA, 2670 bp, synthetic construct
  misc_feature 1..2670: note = Variant of RNA polymerase
  source 1..2670: mol_type = other DNA
atgcaccatcaccatcaccatatgaacacgattaacattgctaagaacgacttctctgacatcgaactggctgctatcccgttcaacactctggctgaccattacggtgagcgtttagctcgcgaacagttggcccttgagcatgagtcttacgagatgggtgaagcacgcttccgcaagatgtttgagcgtcaacttaaagctggtgaggttgcggataacgctgccgccaagcctctcatcactaccctactccctaagatgattgcacgcatcaacgactggtttgaggaagtgaaacgcaagcgcggcaagcgcccgacagccttccagttcctgcaagaaatcaagccggaagccgtagcgtacatcaccattaagaccgtgctggctctgctaaccagtgcggacaatacaaccgttcaggctgtagcaagcgcaatcggtcgggccattgaggacgaggctcgcttcggtcgtatccgtgaccttgaagctaagcacttcaagaagaacgttgaggaacaactcaacaagcgcgtagggcacgtctacaagaaagcatttatgcaagttgtcgagcacgacatgctctctaagggtctactcgggggcgtggcatgggaatcgtggcataaggaagactctattcatgtaggagtacgctgcatcgagatgctcattgagtcaaccggaatggttagcttacaccgccaaaatgctggcgtagtaggtcaagactctgagcgtatcgaactcgcacctgaatacgctgaggctatcgcaacccgtgcaggtgcgctggctggcatctctccgatgttccaaccttgcgtagttcctcctaagccgtggactggcattactggtggtggctattgggctgcggggcgcaaacccctgcagttagtacgtactcgcagtctggcggcacttcgccgctatgaagaagtgtcgatgccggaggtcatcaaagcagtcaacattgcgcagaatacagcatggcgtattaacaagaaagttctcgacgtagcgaataccatcacccaatggaaacactgtccagtcgcagatatccctgcgatggatcgtggcgaaatgccagctcgtccgttggacatcgataccaacgagattgcacttaaagcgtggaagaaagaagcttccgcgttctaccgcaaagacaaagcacgcgttagccgtcgtctgtcaatggagtttatgttatctcaggcgaacaagtttgcgaattatgaggcaatctggtttccgcaaaacatggattggcgtgggcgcgtgtacgctgtcccgatgttcaatcctcagggcaacgatatgacgaaaggcctgctgacctttgcgcaggagaaacccattggtgaagacggcttctattggctcaagattcatggcgcaaatacagctggagtggataaagtaccgtttccacaacgcatcaaatttgttgaggataaccatacgaatattatggaatgcgcgaaagcaccgctggaaaacacttggtgggcggaacaggactcgccgttctgctttctggcgttctgctttgagtatgctggcgtcatcaatagtggtctgtcgtacaactgtagcttgcctctggcattcgatggtagttgctccggcctgcaacatttctcagcgatgttacgcgacgaaattggcggcaaagctgtgaatctcctcccatctgcggaataccaggatatttatcgtatcgtcagcgacaaagttaacgagatgctgaaacaagatctgattaacggtacctctaccaccgtggaaacggtgactgataagaagacaggcgaaattacccaacgcacgaaatacgggaccaaagttatggcacagtggtggttagaacacggtgtgaatcgtggcgtcacgaaacgctcggttatgactttggtgtatggggcgctggagtttggattccgcgatcaagtgctgagtgacaccattcaaaaagcgatcgataacggcaagggtgacatgtttctgaatccgaatcaggctgctggttacatggcgaaactgatctggaacgcagtgtccgggaccgtagtcgcagcagttgaggcgatgaactggctgaaaagtgcggcgaaattacttgctgctgaagtgaaggatcgtaagacggatacagttctgcgtggccgctgcgcagtacattgggtgactcccgacggcttccctgtgtggcaggaatacaagaagcctattcagacgcgcttgaacctgatgttcctcggtcagttccgcttacagcctaccattaacaccaacaaagatagcgagattgatgtgcgcaaacaggtgtctggtatcgctcctaactttgtacacagcctggacggtaaccaccttcgtatgactgtagtgtgggcacacgagaagtacggaatcgaatcttttgcactgattcacgactccttcggtaccattccggctgacgctgcgaacctgttcaaagcagtgcgcgaaactttcgttgacacatatgagtcttgtgatgtactggctgatttctacgaccagattgctgaccagttgcacgagtctcaacgcgacaaaatgccagcacttccggctaaaggtaacttgaacctccgtgacatcttaaaatcggacttcgcgttcgcg

SEQ ID NO: 1902 - protein, 890 aa, synthetic construct
  REGION 1..890: note = Variant of RNA polymerase
MHHHHHHMNTINIAKNDFSDIELAAIPFNTLADHYGERLAREQLALEHESYEMGEARFRKMFERQLKAGEVADNAAAKPLITTLLPKMIARINDWFEEVKRKRGKRPTAFQFLQEIKPEAVAYITIKTVLALLTSADNTTVQAVASAIGRAIEDEARFGRIRDLEAKHFKKNVEEQLNKRVGHVYKKAFMQVVEHDMLSKGLLGGVAWESWHKEDSIHVGVRCIEMLIESTGMVSLHRQNAGVVGQDSERIELAPEYAEAIATRAGALAGISPMFQPCVVPPKPWTGITGGGYWAAGRKPLQLVRTRSLAALRRYEEVSMPEVIKAVNIAQNTAWRINKKVLDVANTITQWKHCPVADIPAMDRGEMPARPLDIDTNEIALKAWKKEASAFYRKDKARVSRRLSMEFMLSQANKFANYEAIWFPQNMDWRGRVYAVPMFNPQGNDMTKGLLTFAQEKPIGEDGFYWLKIHGANTAGVDKVPFPQRIKFVEDNHTNIMECAKAPLENTWWAEQDSPFCFLAFCFEYAGVINSGLSYNCSLPLAFDGSCSGLQHFSAMLRDEIGGKAVNLLPSAEYQDIYRIVSDKVNEMLKQDLINGTSTTVETVTDKKTGEITQRTKYGTKVMAQWWLEHGVNRGVTKRSVMTLVYGALEFGFRDQVLSDTIQKAIDNGKGDMFLNPNQAAGYMAKLIWNAVSGTVVAAVEAMNWLKSAAKLLAAEVKDRKTDTVLRGRCAVHWVTPDGFPVWQEYKKPIQTRLNLMFLGQFRLQPTINTNKDSEIDVRKQVSGIAPNFVHSLDGNHLRMTVVWAHEKYGIESFALIHDSFGTIPADAANLFKAVRETFVDTYESCDVLADFYDQIADQLHESQRDKMPALPAKGNLNLRDILKSDFAFA

SEQ ID NO: 1903 - DNA, 2670 bp, synthetic construct
  misc_feature 1..2670: note = Variant of RNA polymerase
  source 1..2670: mol_type = other DNA
atgcaccatcaccatcaccatatgaacacgattaacattgctaagaacgacttctctgacatcgaactggctgctatcccgttcaacactctggctgaccattacggtgagcgtttagctcgcgaacagttggcccttgagcatgagtcttacgagatgggtgaagcacgcttccgcaagatgtttgagcgtcaacttaaagctggtgaggttgcggataacgctgccgccaagcctctcatcactaccctactccctaagatgattgcacgcatcaacgactggtttgaggaagtgaaacgcaagcgcggcaagcgcccgacagccttccagttcctgcaagaaatcaagccggaagccgtagcgtacatcaccattaagaccactctggctctgctaaccagtgcggacaatacaaccgttcaggctgtagcaagcgcaatcggtcgggccattgaggacgaggctcgcttcggtcgtatccgtgaccttgaagctaagcacttcaagaagaacgttgaggaacaactcaacaagcgcgtagggcacgtctacaagaaagcatttatgcaagttgtcgagcacgacatgctctctaagggtctactcgggggcgtggcatgggaatcgtggcataaggaagactctattcatgtaggagtacgctgcatcgagatgctcattgagtcaaccggaatggttagcttacaccgccaaaatgctggcgtagtaggtcaagactctgagcgtatcgaactcgcacctgaatacgctgaggctatcgcaacccgtgcaggtgcgctggctggcatctctccgatgttccaaccttgcgtagttcctcctaagccgtggactggcattactggtggtggctattgggctgcggggcgcaaacccctgcagttagtacgtactcgcagtctggcggcgcttcgccgctatgaagaagtgtcgatgccggaggtcatcaaagcagtcaacattgcgcagaatacagcatggcgtattaacaagaaagttctcgacgtagcgaataccatcacccaatggaaacactgtccagtcgctgatatccctgcgatggatcgtggcgaaatgccagctcgtccgttggacatcgataccaacgagattgcacttaaagcgtggaagaaagaagcttccgcgttctaccgcaaagacaaagcacgcgttagccgtcgtctgtcaatggagtttatgttatctcaggcgaacaagtttgcgaattatgaggcaatctggtttccgcaaaacatggattggcgtgggcgcgtgtacgctgtcccgatgttcaatcctcagggcaacgatatgacgaaaggcctgctgacctttgcgcaggagaaacccattggtgaagacggcttctattggctcaagattcatggcgcaaatacagctggagtggataaagtaccgtttccacaacgcatcaaatttgttgaggataaccatacgaatattatggaatgcgcgaaagcaccgctggaaaacacttggtgggcggaacaggactcgccgttctgctttctggcgttctgctttgagtatgctggcgtcatcaatagtggtctgtcgtacaactgtagcttgcctctggcatttgatggtagttgctccggcctgcaacatttctcagcgatgttacgcgacgaaattggcggcaaagctgtgaatctcctcccatctgcggaataccaggatatttatcgtatcgtcagcgacaaagttaacgagatgctgaaacaagatctgattaacggtacctctaccaccgtggaaacggtgactgataagaagacaggcgaaattacccaacgcacgaaatacgggaccaaagttatggcacagtggtggttagaacacggtgtgaatcgtggcgtcacgaaacgctcggttatgactttggtgtatggggcgctggagtttggattccgcgatcaagtgctgagtgacaccattcaaaaagcgatcgataacggcaagggtgacatgtttctgaatccgaatcaggctgctggttacatggcgaaactgatctggaacgcagtgtccgggaccgtagtcgcagcagttgaggcgatgaactggctgaaaagtgcggcgaaattacttgctgctgaagtgaaggatcgtaagacggatacagttctgcgtggccgctgcgcagtacattgggtgactcccgacggcttccctgtgtggcaggaatacaagaagcctattcagacgcgcttgaacctgatgttcctcggtcagttccgcttacagcctaccattaacaccaacaaagatagcgagattgatgcacgcaaacaggtgtctggtatcgctcctaactttgtacacagcctggacggtaaccaccttcgtatgactgtagtgtgggcacacgagaagtacggaatcgaatcttttgcactgattcacgactccttcggtaccattccggctgacgctgcgaacctgttcaaagcagtgcgcgaaactttcgttgacacatatgagtcttgtgatgtactggctgatttctacgaccagattgctgaccagttgcacgagtctcaacgcgacaaaatgccagcacttccggctaaaggtaacttgaacctccgtgacatcttaaaatcggacttcgcgttcgcg

SEQ ID NO: 1904 - protein, 890 aa, synthetic construct
  REGION 1..890: note = Variant of RNA polymerase
MHHHHHHMNTINIAKNDFSDIELAAIPFNTLADHYGERLAREQLALEHESYEMGEARFRKMFERQLKAGEVADNAAAKPLITTLLPKMIARINDWFEEVKRKRGKRPTAFQFLQEIKPEAVAYITIKTTLALLTSADNTTVQAVASAIGRAIEDEARFGRIRDLEAKHFKKNVEEQLNKRVGHVYKKAFMQVVEHDMLSKGLLGGVAWESWHKEDSIHVGVRCIEMLIESTGMVSLHRQNAGVVGQDSERIELAPEYAEAIATRAGALAGISPMFQPCVVPPKPWTGITGGGYWAAGRKPLQLVRTRSLAALRRYEEVSMPEVIKAVNIAQNTAWRINKKVLDVANTITQWKHCPVADIPAMDRGEMPARPLDIDTNEIALKAWKKEASAFYRKDKARVSRRLSMEFMLSQANKFANYEAIWFPQNMDWRGRVYAVPMFNPQGNDMTKGLLTFAQEKPIGEDGFYWLKIHGANTAGVDKVPFPQRIKFVEDNHTNIMECAKAPLENTWWAEQDSPFCFLAFCFEYAGVINSGLSYNCSLPLAFDGSCSGLQHFSAMLRDEIGGKAVNLLPSAEYQDIYRIVSDKVNEMLKQDLINGTSTTVETVTDKKTGEITQRTKYGTKVMAQWWLEHGVNRGVTKRSVMTLVYGALEFGFRDQVLSDTIQKAIDNGKGDMFLNPNQAAGYMAKLIWNAVSGTVVAAVEAMNWLKSAAKLLAAEVKDRKTDTVLRGRCAVHWVTPDGFPVWQEYKKPIQTRLNLMFLGQFRLQPTINTNKDSEIDARKQVSGIAPNFVHSLDGNHLRMTVVWAHEKYGIESFALIHDSFGTIPADAANLFKAVRETFVDTYESCDVLADFYDQIADQLHESQRDKMPALPAKGNLNLRDILKSDFAFA

SEQ ID NO: 1905 - DNA, 2670 bp, synthetic construct
  misc_feature 1..2670: note = Variant of RNA polymerase
  source 1..2670: mol_type = other DNA
atgcaccatcaccatcaccatatgaacacgattaacattgctaagaacgacttctctgacatcgaactggctgctatcccgttcaacactctggctgaccattacggtgagcgtttagctcgcgaacagttggcccttgagcatgagtcttacgagatgggtgaagcacgcttccgcaagatgtttgagcgtcaacttaaagctggtgaggttgcggataacgctgccgccaagcctctcatcactaccctactccctaagatgattgcacgcatcaacgactggtttgaggaagtgaaagctaagcgcggcaagcgcccgacagccttccagttcctgcaagaaatcaagccggaagccgtagcgtacatcaccattaagaccactctggcttgcctaaccagtgcggacaatacgagtgttcaggctgtggcaagcgcaatcggtcgggccattgaggacgaggctcgcttcggtcgtatccgtgaccttgaagctaagcacttcaagaagaacgttgaggaacaactcaacaagcgcgtagggcacgtctacaagaaagcatttatgcaagttgtcgagcacgacatgctctctaagggtctactcggtggcgaggcgtggtcttcgtggcataaggaagactctattcatgtaggagtacgctgcatcgagatgctcattgagtcaaccggaatggttagcttacaccgccaaaatgctggcgtagtaggtcaagactctgagcgtatcgaactcgcacctgaatacgctgaggctatcgcaacccgtgcaggtgcgctggctggcatctctccgatgttccaaccttgcgtagttcctcctaagccgtggactggcattactggtggtggctattgggctgcggggcgcaaacccctgcagttagtacgtactcgcagtctggcggcgcttcgccgctatgaagaagtgtcgatgccggaggtcatcaaagcagtcaacattgcgcagaatacagcatggcgtattaacaagaaagttctcgacgtagcgaataccatcacccaatggaaacactgtccagtcgctgatatccctgcgatggatcgtggcgaaatgccagctcgtccgttggacatcgataccaacgagattgcacttaaagcgtggaagaaagaagcttccgcgttctaccgcaaagacaaagcacgcgttagccgtcgtctgtcaatggagtttatgttatctcaggcgaacaagtttgcgaattatgaggcaatctggtttccgcaaaacatggattggcgtgggcgcgtgtacgctgtcccgatgttcaatcctcagggcaacgatatgacgaaaggcctgctgacctttgcgcaggagaaacccattggtgaagacggcttctattggctcaagattcatggcgcaaatacagctggagtggataaagtaccgtttccacaacgcatcaaatttgttgaggataaccatacgaatattatggaatgcgcgaaagcaccgctggaaaacacttggtgggcggaacaggactcgccgttctgctttctggcgttctgctttgagtatgctggcgtcatcaatagtggtctgtcgtacaactgtagcttgcctctggcatttgatggtagttgctccggcctgcaacatttctcagcgatgttacgcgacgaaattggcggcaaagctgtgaatctcctcccatctgcggaataccaggatatttatcgtatcgtcagcgacaaagttaacgagatgctgaaacaagatctgattaacggtacctctaccaccgtggaaacggtgactgataagaagacaggcgaaattacccaacgcacgaaatacgggaccaaagttatggcacagtggtggttagaacacggtgtgaatcgtggcgtcacgaaacgctcggttatgactttggtgtatggggcgctggagtttggattccgcgatcaagtgctgaaggacaccatcgggaaagcgatcgataacggcaagggtgacatgtttctgaatccgaatcaggctgctggttacatggcgaaactgatctggaacgcagtgtccgggaccgtagtcgcagcagttgaggcgatgaactggctgaaaagtgcggcgaaattacttgctgctgaagtgaaggatcgtaagacggatacagttctgcgtggccgctgcgcagtacattgggtgactcccgacggcttccctgtgtggcaggaatacaagaagcctattcagacgcgcttgaacctgatgttcctcggtcagttccgcttacagcctaccattaacaccaacaaagatagcgagattgatgcacgcaaacaggtgtctggtatcgctcctaactttgtacacagcctggacgggaaccaccttcgtatgactgtagtgtgggcacacgagaagtacggaatcgaatcttttgcactgattcacgactccttcggtaccattccggctgacgctgcgaacctgttcaaagcagtgcgcgaaactttcgttgacacatatgagtcttgtgatgtactggctgatttctacgaccagattgctgaccagttgcacgagtctcaacgcgacaaaatgccagcacttccggctaaaggtaacttgaacctccgtgacatcttaaaatcggacttcgcgttcgcg

SEQ ID NO: 1906 - protein, 890 aa, synthetic construct
  REGION 1..890: note = Variant of RNA polymerase
MHHHHHHMNTINIAKNDFSDIELAAIPFNTLADHYGERLAREQLALEHESYEMGEARFRKMFERQLKAGEVADNAAAKPLITTLLPKMIARINDWFEEVKAKRGKRPTAFQFLQEIKPEAVAYITIKTTLACLTSADNTSVQAVASAIGRAIEDEARFGRIRDLEAKHFKKNVEEQLNKRVGHVYKKAFMQVVEHDMLSKGLLGGEAWSSWHKEDSIHVGVRCIEMLIESTGMVSLHRQNAGVVGQDSERIELAPEYAEAIATRAGALAGISPMFQPCVVPPKPWTGITGGGYWAAGRKPLQLVRTRSLAALRRYEEVSMPEVIKAVNIAQNTAWRINKKVLDVANTITQWKHCPVADIPAMDRGEMPARPLDIDTNEIALKAWKKEASAFYRKDKARVSRRLSMEFMLSQANKFANYEAIWFPQNMDWRGRVYAVPMFNPQGNDMTKGLLTFAQEKPIGEDGFYWLKIHGANTAGVDKVPFPQRIKFVEDNHTNIMECAKAPLENTWWAEQDSPFCFLAFCFEYAGVINSGLSYNCSLPLAFDGSCSGLQHFSAMLRDEIGGKAVNLLPSAEYQDIYRIVSDKVNEMLKQDLINGTSTTVETVTDKKTGEITQRTKYGTKVMAQWWLEHGVNRGVTKRSVMTLVYGALEFGFRDQVLKDTIGKAIDNGKGDMFLNPNQAAGYMAKLIWNAVSGTVVAAVEAMNWLKSAAKLLAAEVKDRKTDTVLRGRCAVHWVTPDGFPVWQEYKKPIQTRLNLMFLGQFRLQPTINTNKDSEIDARKQVSGIAPNFVHSLDGNHLRMTVVWAHEKYGIESFALIHDSFGTIPADAANLFKAVRETFVDTYESCDVLADFYDQIADQLHESQRDKMPALPAKGNLNLRDILKSDFAFA

SEQ ID NO: 1907 - DNA, 2670 bp, synthetic construct
  misc_feature 1..2670: note = Variant of RNA polymerase
  source 1..2670: mol_type = other DNA
atgcaccatcaccatcaccatatgaacacgattaacattgctaagaacgacttctctgacatcgaactggctgctatcccgttcaacactctggctgaccattacggtgagcgtttagctcgcgaacagttggcccttgagcatgagtcttacgagatgggtgaagcacgcttccgcaagatgtttgagcgtcaacttaaagctggtgaggttgcggataacgctgccgccaagcctctcatcactaccctactccctaagatgattgcacgcatcaacgactggtttgaggaagtgaaagctaagcgcggcaagcgcccgacagccttccagttcctgcaagaaatcaagccggaagccgtagcgtacatcaccattaagaccactctggcttgcctaaccagtgcggacaatacgactgttcaggctgtggcaagcgcaatcggtcgggccattgaggacgaggctcgcttcggtcgtatccgtgaccttgaagctaagcacttcaagaagaacgttgaggaacaactcaacaagcgcgtagggcacgtctacaagaaagcatttatgcaagttgtcgagcacgacatgctctctaagggtctactcggtggcggggcgtggtctcgctggcataaggaagactctattcatgtaggagtacgctgcatcgagatgctcattgagtcaaccggaatggttagcttacaccgccaaaatgctggcgtagtaggtcaagactctgagcgtatcgaactcgcacctgaatacgctgaggctatcgcaacccgtgcaggtgcgctggctggcatctctccgatgttccaaccttgcgtagttcctcctaagccgtggactggcattactggtggtggctattgggctgcggggcgcaaacccctgcagttagtacgtactcgcagtctggcggcgcttcgccgctatgaagaagtgtcgatgccggaggtcatcaaagcagtcaacattgcgcagaatacagcatggcgtattaacaagaaagttctcgacgtagcgaataccatcacccaatggaaacactgtccagtcgctgatatccctgcgatggatcgtggcgaaatgccagctcgtccgttggacatcgataccaacgagattgcacttaaagcgtggaagaaagaagcttccgcgttctaccgcaaagacaaagcacgcgttagccgtcgtctgtcaatggagtttatgttatctcaggcgaacaagtttgcgaattatgaggcaatctggtttccgcaaaacatggattggcgtgggcgcgtgtacgctgtcccgatgttcaatcctcagggcaacgatatgacgaaaggcctgctgacctttgcgcaggagaaacccattggtgaagacggcttctattggctcaagattcatggcgcaaatacagctggagtggataaagtaccgtttccacaacgcatcaaatttgttgaggataaccatacgaatattatggaatgcgcgaaagcaccgctggaaaacacttggtgggcggaacaggactcgccgttctgctttctggcgttctgctttgagtatgctggcgtcatcaatagtggtctgtcgtacaactgtagcttgcctctggcatttgatggtagttgctccggcctgcaacatttctcagcgatgttacgcgacgaaattggcggcaaagctgtgaatctcctcccatctgcggaataccaggatatttatcgtatcgtcagcgacaaagttaacgagatgctgaaacaagatctgattaacggtacctctaccaccgtggaaacggtgactgataagaagacaggcgaaattacccaacgcacgaaatacgggaccaaagttatggcacagtggtggttagaacacggtgtgactcgtggcgtcacgaaacgctcggttatgactttggtgtatggggcgctggagtttggattccgcgatcaagtgctgagtgacaccgtcgggaaagcgatcgataacggcaagggtgacatgtttctgaatccgaatcaggctgctggttacatggcgaaactgatctggaacgcagtgtccgggaccgtagtcgcagcagttgaggcgatgaactggctgaaaagtgcggcgaaattacttgctgctgaagtgaaggatcgtaagacggatacagttctgcgtggccgctgcgcagtacattgggtgactcccgacggcttccctgtgtggcaggaatacaagaagcctattcagacgcgcttgaacctgatgttcctcggtcagttccgcttacagcctaccattaacaccaacaaagatagcgagattgatgcacgcaaacaggtgtctggtatcgctcctaactttgtacacagcctggacggtaaccaccttcgtatgactgtagtgtgggcacacgagaagtacggaatcgaatcttttgcactgattcacgactccttcggtaccattccggctgacgctgcgaacctgttcaaagcagtgcgcgaaactttcgttgacacatatgagtcttgtgatgtactggctgatttctacgaccagattgctgaccagttgcacgagtctcaacgcgacaaaatgccagcacttccggctaaaggtaacttgaacctccgtgacatcttaaaatcggacttcgcgttcgcg

SEQ ID NO: 1908 - protein, 890 aa, synthetic construct
  REGION 1..890: note = Variant of RNA polymerase
MHHHHHHMNTINIAKNDFSDIELAAIPFNTLADHYGERLAREQLALEHESYEMGEARFRKMFERQLKAGEVADNAAAKPLITTLLPKMIARINDWFEEVKAKRGKRPTAFQFLQEIKPEAVAYITIKTTLACLTSADNTTVQAVASAIGRAIEDEARFGRIRDLEAKHFKKNVEEQLNKRVGHVYKKAFMQVVEHDMLSKGLLGGGAWSRWHKEDSIHVGVRCIEMLIESTGMVSLHRQNAGVVGQDSERIELAPEYAEAIATRAGALAGISPMFQPCVVPPKPWTGITGGGYWAAGRKPLQLVRTRSLAALRRYEEVSMPEVIKAVNIAQNTAWRINKKVLDVANTITQWKHCPVADIPAMDRGEMPARPLDIDTNEIALKAWKKEASAFYRKDKARVSRRLSMEFMLSQANKFANYEAIWFPQNMDWRGRVYAVPMFNPQGNDMTKGLLTFAQEKPIGEDGFYWLKIHGANTAGVDKVPFPQRIKFVEDNHTNIMECAKAPLENTWWAEQDSPFCFLAFCFEYAGVINSGLSYNCSLPLAFDGSCSGLQHFSAMLRDEIGGKAVNLLPSAEYQDIYRIVSDKVNEMLKQDLINGTSTTVETVTDKKTGEITQRTKYGTKVMAQWWLEHGVTRGVTKRSVMTLVYGALEFGFRDQVLSDTVGKAIDNGKGDMFLNPNQAAGYMAKLIWNAVSGTVVAAVEAMNWLKSAAKLLAAEVKDRKTDTVLRGRCAVHWVTPDGFPVWQEYKKPIQTRLNLMFLGQFRLQPTINTNKDSEIDARKQVSGIAPNFVHSLDGNHLRMTVVWAHEKYGIESFALIHDSFGTIPADAANLFKAVRETFVDTYESCDVLADFYDQIADQLHESQRDKMPALPAKGNLNLRDILKSDFAFA

SEQ ID NO: 1909 - DNA, 2670 bp, synthetic construct
  misc_feature 1..2670: note = Variant of RNA polymerase
  source 1..2670: mol_type = other DNA
atgcaccatcaccatcaccatatgaacacgattaacattgctaagaacgacttctctgacatcgaactggctgctatcccgttcaacactctggctgaccattacggtgagcgtttagctcgcgaacagttggcccttgagcatgagtcttacgagatgggtgaagcacgcttccgcaagatgtttgagcgtcaacttaaagctggtgaggttgcggataacgctgccgccaagcctctcatcactaccctactccctaagatgattgcacgcatcaacgactggtttgaggaagtgaaagctaagcgcggcaagcgcccgacagccttccagttcctgcaagaaatcaagccggaagccgtagcgtacatcaccattaagaccactctggcttgcctaaccagtgcggacaatacgcgtgttcaggctctggcaagcgcaatcggtcgggccattgaggacgaggctcgcttcggtcgtatccgtgaccttgaagctaagcacttcaagaagaacgttgaggaacaactcaacaagcgcgtagggcacgtctacaagaaagcatttatgcaagttgtcgagcacgacatgctctctaagggtctactcggtggcgaggcgtggtcttcgtggcataaggaagactctattcatgtaggagtacgctgcatcgagatgctcattgagtcaaccggaatggttagcttacaccgccaaaatgctggcgtagtaggtcaagactctgagcgtatcgaactcgcacctgaatacgctgaggctatcgcaacccgtgcaggtgcgctggctggcatctctccgatgttccaaccttgcgtagttcctcctaagccgtggactggcattactggtggtggctattgggctgcggggcgcaaacccctgcagttagtacgtactcgcagtctggcggcgcttcgccgctatgaagaagtgtcgatgccggaggtcatcaaagcagtcaacattgcgcagaatacagcatggcgtattaacaagaaagttctcgacgtagcgaataccatcacccaatggaaacactgtccagtcgctgatatccctgcgatggatcgtggcgaaatgccagctcgtccgttggacatcgataccaacgagattgcacttaaagcgtggaagaaagaagcttccgcgttctaccgcaaagacaaagcacgcgttagccgtcgtctgtcaatggagtttatgttatctcaggcgaacaagtttgcgaattatgaggcaatctggtttccgcaaaacatggattggcgtgggcgcgtgtacgctgtcccgatgttcaatcctcagggcaacgatatgacgaaaggcctgctgacctttgcgcaggagaaacccattggtgaagacggcttctattggctcaagattcatggcgcaaatacagctggagtggataaagtaccgtttccacaacgcatcaaatttgttgaggataaccatacgaatattatggaatgcgcgaaagcaccgctggaaaacacttggtgggcggaacaggactcgccgttctgctttctggcgttctgctttgagtatgctggcgtcatcaatagtggtctgtcgtacaactgtagcttgcctctggcatttgatggtagttgctccggcctgcaacatttctcagcgatgttacgcgacgaaattggcggcaaagctgtgaatctcctcccatctgcggaataccaggatatttatcgtatcgtcagcgacaaagttaacgagatgctgaaacaagatctgattaacggtacctctaccaccgtggaaacggtgactgataagaagacaggcgaaattacccaacgcacgaaatacgggaccaaagttatggcacagtggtggttagaacacggtgtgaatcgtggcgtcacgaaacgctcggttatgactttggtgtatggggcgctggagtttggattccgcgatcaagtgctgaaggacaccatcgggaaagcgatcgataacggcaagggtgacatgtttctgaatccgaatcaggctgctggttacatggcgaaactgatctggaacgcagtgtccgggaccgtagtcgcagcagttgaggcgatgaactggctgaaaagtgcggcgaaattacttgctgctgaagtgaaggatcgtaagacggatacagttctgcgtggccgctgcgcagtacattgggtgactcccgacggcttccctgtgcaccaggaatacaagaagcctattcagacgcgcttgaacctgatgttcctcggtcagttccgcttacagcctaccattaacaccaacaaagatagcgagattgatgcacgcaaacaggtgtctggtatcgctcctaactttgtacacagcctggacggtaaccaccttcgtatgactgtagtgtgggcacacgagaagtacggaatcgaatcttttgcactgattcacgactccttcggtaccattccggctgacgctgcgaacctgttcaaagcagtgcgcgaaactttcgttgacacatatgagtcttgtgatgtactggctgatttctacgaccagattgctgaccagttgcacgagtctcaacgcgacaaaatgccagcacttccggctaaaggtaacttgaacctccgtgacatcttaaaatcggacttcgcgttcgcg

SEQ ID NO: 1910 - protein, 890 aa, synthetic construct
  REGION 1..890: note = Variant of RNA polymerase
MHHHHHHMNTINIAKNDFSDIELAAIPFNTLADHYGERLAREQLALEHESYEMGEARFRKMFERQLKAGEVADNAAAKPLITTLLPKMIARINDWFEEVKAKRGKRPTAFQFLQEIKPEAVAYITIKTTLACLTSADNTRVQALASAIGRAIEDEARFGRIRDLEAKHFKKNVEEQLNKRVGHVYKKAFMQVVEHDMLSKGLLGGEAWSSWHKEDSIHVGVRCIEMLIESTGMVSLHRQNAGVVGQDSERIELAPEYAEAIATRAGALAGISPMFQPCVVPPKPWTGITGGGYWAAGRKPLQLVRTRSLAALRRYEEVSMPEVIKAVNIAQNTAWRINKKVLDVANTITQWKHCPVADIPAMDRGEMPARPLDIDTNEIALKAWKKEASAFYRKDKARVSRRLSMEFMLSQANKFANYEAIWFPQNMDWRGRVYAVPMFNPQGNDMTKGLLTFAQEKPIGEDGFYWLKIHGANTAGVDKVPFPQRIKFVEDNHTNIMECAKAPLENTWWAEQDSPFCFLAFCFEYAGVINSGLSYNCSLPLAFDGSCSGLQHFSAMLRDEIGGKAVNLLPSAEYQDIYRIVSDKVNEMLKQDLINGTSTTVETVTDKKTGEITQRTKYGTKVMAQWWLEHGVNRGVTKRSVMTLVYGALEFGFRDQVLKDTIGKAIDNGKGDMFLNPNQAAGYMAKLIWNAVSGTVVAAVEAMNWLKSAAKLLAAEVKDRKTDTVLRGRCAVHWVTPDGFPVHQEYKKPIQTRLNLMFLGQFRLQPTINTNKDSEIDARKQVSGIAPNFVHSLDGNHLRMTVVWAHEKYGIESFALIHDSFGTIPADAANLFKAVRETFVDTYESCDVLADFYDQIADQLHESQRDKMPALPAKGNLNLRDILKSDFAFA

SEQ ID NO: 1911 - DNA, 2670 bp, synthetic construct
  misc_feature 1..2670: note = Variant of RNA polymerase
  source 1..2670: mol_type = other DNA
atgcaccatcaccatcaccatatgaacacgattaacattgctaagaacgacttctctgacatcgaactggctgctatcccgttcaacactctggctgaccattacggtgagcgtttagctcgcgaacagttggcccttgagcatgagtcttacgagatgggtgaagcacgcttccgcaagatgtttgagcgtcaacttaaagctggtgaggttgcggataacgctgccgccaagcctctcatcactaccctactccctaagatgattgcacgcatcaacgactggtttgaggaagtgaaagctaagcgcggcaagcgcccgacagccttccagttcctgcaagaaatcaagccggaagccgtagcgtacatcaccattaagaccactctggcttgcctaaccagtgcggacaatcgtcgtgttcaggctgtggcaagcgcaatcggtcgggccattgaggacgaggctcgcttcggtcgtatccgtgaccttgaagctaagcacttcaagaagaacgttgaggaacaactcaacaagcgcgtagggcacgtctacaagaaagcatttatgcaagttgtcgagcacgacatgctctctaagggtctactcggtggcgaggcgtggtcttcgtggcataaggaagactctattcatgtaggagtacgctgcatcgagatgctcattgagtcaaccggaatggttagcttacaccgccaaaatgctggcgtagtaggtcaagactctgagcgtatcgaactcgcacctgaatacgctgaggctatcgcaacccgtgcaggtgcgctggctggcatctctccgatgttccaaccttgcgtagttcctcctaagccgtggactggcattactggtggtggctattgggctgcggggcgcaaacccctgcagttagtacgtactcgcagtctggcggcgcttcgccgctatgaagaagtgtcgatgccggaggtcatcaaagcagtcaacattgcgcagaatacagcatggcgtattaacaagaaagttctcgacgtagcgaataccatcacccaatggaaacactgtccagtcgctgatatccctgcgatggatcgtggcgaaatgccagctcgtccgttggacatcgataccaacgagattgcacttaaagcgtggaagaaagaagcttccgcgttctaccgcaaagacaaagcacgcgttagccgtcgtctgtcaatggagtttatgttatctcaggcgaacaagtttgcgaattatgaggcaatctggtttccgcaaaacatggattggcgtgggcgcgtgtacgctgtcccgatgttcaatcctcagggcaacgatatgacgaaaggcctgctgacctttgcgcaggagaaacccattggtgaagacggcttctattggctcaagattcatggcgcaaatacagctggagtggataaagtaccgtttccacaacgcatcaaatttgttgaggataaccatacgaatattatggaatgcgcgaaagcaccgctggaaaacacttggtgggcggaacaggactcgccgttctgctttctggcgttctgctttgagtatgctggcgtcatcaatagtggtctgtcgtacaactgtagcttgcctctggcatttgatggtagttgctccggcctgcaacatttctcagcgatgttacgcgacgaaattggcggcaaagctgtgaatctcctcccatctgcggaataccaggatatttatcgtatcgtcagcgacaaagttaacgagatgctgaaacaagatctgattaacggtacctctaccaccgtggaaacggtgactgataagaagacaggcgaaattacccaacgcacgaaatacgggaccaaagttatggcacagtggtggttagaacacggtgtgactcgtggcgtcacgaaacgctcggttatgactttggtgtatggggcgctggagtttggattccgcgatcaagtgctgaaggacaccgtccagaaagcgatcgataacggcaagggtgacatgtttctgaatccgaatcaggctgctggttacatggcgaaactgatctggaacgcagtgtccgggaccgtagtcgcagcagttgaggcgatgaactggctgaaaagtgcggcgaaattacttgctgctgaagtgaaggatcgtaagacggatacagttctgcgtggccgctgcgcagtacattgggtgactcccgacggcttccctgtgtggcaggaatacaagaagcctattcagacgcgcttgaacctgatgttcctcggtcagttccgcttacagcctaccattaacaccaacaaagatagcgagattgatgcacgcaaacaggtgtctggtatcgctcctaactttgtacacagcctggacggtaaccaccttcgtatgactgtagtgtgggcacacgagaagtacggaatcgaatcttttgcactgattcacgactccttcggtaccattccggctgacgctgcgaacctgttcaaagcagtgcgcgaaactttcgttgacacatatgagtcttgtgatgtactggctgatttctacgaccagattgctgaccagttgcacgagtctcaacgcgacaaaatgccagcacttccggctaaaggtaacttgaacctccgtgacatcttaaaatcggacttcgcgttcgcg

SEQ ID NO: 1912 - protein, 890 aa, synthetic construct
  REGION 1..890: note = Variant of RNA polymerase
MHHHHHHMNTINIAKNDFSDIELAAIPFNTLADHYGERLAREQLALEHESYEMGEARFRKMFERQLKAGEVADNAAAKPLITTLLPKMIARINDWFEEVKAKRGKRPTAFQFLQEIKPEAVAYITIKTTLACLTSADNRRVQAVASAIGRAIEDEARFGRIRDLEAKHFKKNVEEQLNKRVGHVYKKAFMQVVEHDMLSKGLLGGEAWSSWHKEDSIHVGVRCIEMLIESTGMVSLHRQNAGVVGQDSERIELAPEYAEAIATRAGALAGISPMFQPCVVPPKPWTGITGGGYWAAGRKPLQLVRTRSLAALRRYEEVSMPEVIKAVNIAQNTAWRINKKVLDVANTITQWKHCPVADIPAMDRGEMPARPLDIDTNEIALKAWKKEASAFYRKDKARVSRRLSMEFMLSQANKFANYEAIWFPQNMDWRGRVYAVPMFNPQGNDMTKGLLTFAQEKPIGEDGFYWLKIHGANTAGVDKVPFPQRIKFVEDNHTNIMECAKAPLENTWWAEQDSPFCFLAFCFEYAGVINSGLSYNCSLPLAFDGSCSGLQHFSAMLRDEIGGKAVNLLPSAEYQDIYRIVSDKVNEMLKQDLINGTSTTVETVTDKKTGEITQRTKYGTKVMAQWWLEHGVTRGVTKRSVMTLVYGALEFGFRDQVLKDTVQKAIDNGKGDMFLNPNQAAGYMAKLIWNAVSGTVVAAVEAMNWLKSAAKLLAAEVKDRKTDTVLRGRCAVHWVTPDGFPVWQEYKKPIQTRLNLMFLGQFRLQPTINTNKDSEIDARKQVSGIAPNFVHSLDGNHLRMTVVWAHEKYGIESFALIHDSFGTIPADAANLFKAVRETFVDTYESCDVLADFYDQIADQLHESQRDKMPALPAKGNLNLRDILKSDFAFA

SEQ ID NO: 1913 - DNA, 2670 bp, synthetic construct
  misc_feature 1..2670: note = Variant of RNA polymerase
  source 1..2670: mol_type = other DNA
atgcaccatcaccatcaccatatgaacacgattaacattgctaagaacgacttctctgacatcgaactggctgctatcccgttcaacactctggctgaccattacggtgagcgtttagctcgcgaacagttggcccttgagcatgagtcttacgagatgggtgaagcacgcttccgcaagatgtttgagcgtcaacttaaagctggtgaggttgcggataacgctgccgccaagcctctcatcactaccctactccctaagatgattgcacgcatcaacgactggtttgaggaagtgaaagccaagcgcggcaagcgcccgacagccttccagttcctgcaagaaatcaagccggaagccgtagcgtacatcaccattaagaccactctggcttgcctaaccagtgcggacaatacaaccgttcaggctgtagcaagcgcaatcggtaaagccattgaggacgaggctcgcttcggtcgtatccgtgaccttgaagctaagcacttcaagaagaacgttgaggaacaactcaacaagcgcgtagggcacgtctacaagaaagcatttatgcaagttgtcgagcacgacatgctctctaagggtctactcgggggcgtggtatggtcgtcgtggcataaggaagactctattcatgtaggagtacgctgcatcgagatgctcattgagtcaaccggaatggttagcttacaccgccaaaatgctggcgtagtaggtcaagactctgagcgtatcgaactcgcacctgaatacgctgaggctatcgcaacccgtgcaggtgcgctggctggcatctctccgatgttccaaccttgcgtagttcctcctaagccgtggactggcattactggtggtggctattgggctgcggggcgcaaacccctgcagttagtacgtactcgcagtctggcggcgcttcgccgctatgaagaagtgtcgatgccggaggtcatcaaagcagtcaacattgcgcagaatacagcatggcgtattaacaagaaagttctcgacgtagcgaataccatcacccaatggaaacactgtccagtcgcagatatccctgcgatggatcgtggcgaaatgccagctcgtccgttggacatcgataccaacgagattgcacttaaagcgtggaagaaagaagcttccgcgttctaccgcaaagacaaagcacgcgttagccgtcgtctgtcaatggagtttatgttatctcaggcgaacaagtttgcgaattatgaggcaatctggtttccgtggaacatggattggcgtgggcgcgtgtacgctgtcccgatgttcaatcctcagggcaacgatatgacgaaaggcctgctgacctttgcgcaggagaaacccattggtgaagacggcttctattggctcaagattcatggcgcaaagacagctggagtggataaagtaccgtttccacaacgcatcaaatttgttgaggataaccatacgaatattatggaatgcgcgaaagcaccgctggaaaacacttggtgggcggaacaggactcgccgttctgctttctggcgttctgctttgagtatgctggcgtcatcaatagtggtctgtcgtacaactgtagcttgcctctggcattcgatggtagttgctccggcctgcaacatttctcagcgatgttacgcgacgaaattggcggcaaagctgtgaatctcctcccatctgcggaataccaggatatttatcgtatcgtcagcgacaaagttaacgagatgctgaaacaagatctgattaacggtacctctaccaccgtggaaacggtgactgataagaagacaggcgaaattacccaacgcacgaaatacgggaccaaagttatggcacagtggtggttagaacacggtgtgaatcgtggcgtcacgaaacgctcggttatgactttggtgtatggggcgctggagtttggattccgcgatcaagtgctgagtgacaccattcaaaaagcgatcgataacggcaagggtgacatgtttctgaatccgaatcaggctgctggttacatggcgaaactgatctggaacgcagtgtccgggaccgtagtcgcagcagttgaggcgatgaactggctgaaaagtgcggcgaaattacttgctgctgaagtgaaggatcgtaagacggatacagttctgcgtggccgctgcgcagtacattgggtgactcccgacggcttccctgtgtggcaggaatacaagaagcctattcagacgcgcttgaacctgatgttcctcggtcagttccgcttacagcctaccattaacaccaacaaagatagcgagattgatgcgcgcaaacaggtgtctggtatcgctcctaactttgtacacagcctggacggtaaccaccttcgtatgactgtagtgtgggcacacgagaagtacggaatcgaatcttttgcactgattcacgactccttcggtaccattccggctgacgctgcgaacctgttcaaagcagtgcgcgaaactttcgttgacacatatgagtcttgtgatgtactggctgatttctacgaccagattgctgaccagttgcacgagtctcaacgcgacaaaatgccagcacttccggctaaaggtaacttgaacctccgtgacatcttaaaatcggacttcgcgttcgcg

SEQ ID NO: 1914 - protein, 890 aa, synthetic construct
  REGION 1..890: note = Variant of RNA polymerase
MHHHHHHMNTINIAKNDFSDIELAAIPFNTLADHYGERLAREQLALEHESYEMGEARFRKMFERQLKAGEVADNAAAKPLITTLLPKMIARINDWFEEVKAKRGKRPTAFQFLQEIKPEAVAYITIKTTLACLTSADNTTVQAVASAIGKAIEDEARFGRIRDLEAKHFKKNVEEQLNKRVGHVYKKAFMQVVEHDMLSKGLLGGVVWSSWHKEDSIHVGVRCIEMLIESTGMVSLHRQNAGVVGQDSERIELAPEYAEAIATRAGALAGISPMFQPCVVPPKPWTGITGGGYWAAGRKPLQLVRTRSLAALRRYEEVSMPEVIKAVNIAQNTAWRINKKVLDVANTITQWKHCPVADIPAMDRGEMPARPLDIDTNEIALKAWKKEASAFYRKDKARVSRRLSMEFMLSQANKFANYEAIWFPWNMDWRGRVYAVPMFNPQGNDMTKGLLTFAQEKPIGEDGFYWLKIHGAKTAGVDKVPFPQRIKFVEDNHTNIMECAKAPLENTWWAEQDSPFCFLAFCFEYAGVINSGLSYNCSLPLAFDGSCSGLQHFSAMLRDEIGGKAVNLLPSAEYQDIYRIVSDKVNEMLKQDLINGTSTTVETVTDKKTGEITQRTKYGTKVMAQWWLEHGVNRGVTKRSVMTLVYGALEFGFRDQVLSDTIQKAIDNGKGDMFLNPNQAAGYMAKLIWNAVSGTVVAAVEAMNWLKSAAKLLAAEVKDRKTDTVLRGRCAVHWVTPDGFPVWQEYKKPIQTRLNLMFLGQFRLQPTINTNKDSEIDARKQVSGIAPNFVHSLDGNHLRMTVVWAHEKYGIESFALIHDSFGTIPADAANLFKAVRETFVDTYESCDVLADFYDQIADQLHESQRDKMPALPAKGNLNLRDILKSDFAFA

SEQ ID NO: 1915 - DNA, 2670 bp, synthetic construct
  misc_feature 1..2670: note = Variant of RNA polymerase
  source 1..2670: mol_type = other DNA
atgcaccatcaccatcaccatatgaacacgattaacattgctaagaacgacttctctgacatcgaactggctgctatcccgttcaacactctggctgaccattacggtgagcgtttagctcgcgaacagttggcccttgagcatgagtcttacgagatgggtgaagcacgcttccgcaagatgtttgagcgtcaacttaaagctggtgaggttgcggataacgctgccgccaagcctctcatcactaccctactccctaagatgattgcacgcatcaacgactggtttgaggaagtgaaagccaagcgcggcaagcgcccgacagccttccagttcctgcaagaaatcaagccggaagccgtagcgtacatcaccattaagaccactctggcttgcctaaccagtgcggacaatacaaccgttcaggctgtagcaagcgcaatcggtaaagccattgaggacgaggctcgcttcggtcgtatccgtgaccttgaagctaagcacttcaagaagaacgttgaggaacaactcaacaagcgcgtagggcacgtctacaagaaagcatttatgcaagttgtcgagcacgacatgctctctaagggtctactcgggggcgtggtatggtcgtcgtggcataaggaagactctattcatgtaggagtacgctgcatcgagatgctcattgagtcaaccggaatggttagcttacaccgccaaaatgctggcgtagtaggtcaagactctgagcgtatcgaactcgcacctgaatacgctgaggctatcgcaacccgtgcaggtgcgctggctggcatctctccgatgttccaaccttgcgtagttcctcctaagccgtggactggcattactggtggtggctattgggctgcggggcgcaaacccctgcagttagtacgtactcgcagtctggcggcgcttcgccgctatgaagaagtgtcgatgccggaggtcatcaaagcagtcaacattgcgcagaatacagcatggcgtattaacaagaaagttctcgacgtagcgaataccatcacccaatggaaacactgtccagtcgcagatatccctgcgatggatcgtggcgaaatgccagctcgtccgttggacatcgataccaacgagattgcacttaaagcgtggaagaaagaagcttccgcgttctaccgcaaagacaaagcacgcgttagccgtcgtctgtcaatggagtttatgttatctcaggcgaacaagtttgcgaattatgaggcaatctggtttccgtggaacatggattggcgtgggcgcgtgtacgctgtcccgatgttcaatcctcagggcaacgatatgacgaaaggcctgctgacctttgcgcaggagaaacccattggtgaagacggcttctattggctcaagattcatggcgcaaatacagctggagtggataaagtaccgtttccacaacgcatcaaatttgttgaggataaccatacgaatattatggaatgcgcgaaagcaccgctggaaaacacttggtgggcggaacaggactcgccgttctgctttctggcgttctgctttgagtatgctggcgtcatcaatagtggtctgtcgtacaactgtagcttgcctctggcattcgatggtagttgctccggcctgcaacatttctcagcgatgttacgcgacgaaattggcggcaaagctgtgaatctcctcccatctgcggaataccaggatatttatcgtatcgtcagcgacaaagttaacgagatgctgaaacaagatctgattaacggtacctctaccaccgtggaaacggtgactgataagaagacaggcgaaattacccaacgcacgaaatacgggaccaaagttatggcacagtggtggttagaacacggtgtgaatcgtggcgtcacgaaacgctcggttatgactttggtgtatggggcgctggagtttggattccgcgatcaagtgctgagtgacaccattcaaaaagcgatcgataacggcaagggtgacatgtttctgaatccgaatcaggctgctggttacatggcgaaactgatctggaacgcagtgtccgggacctgtgtcgcagcagttgaggcgatgaactggctgaaaagtgcggcgaaattacttgctgctgaagtgaaggatcgtaagacggatacagttctgcgtggccgctgcgcagtacattgggtgactcccgacggcttccctgtgtggcaggaatacaagaagcctattcagacgcgcttgaacctgatgttcctcggtcagttccgcttacagcctaccattaacaccaacaaagatagcgagattgatgcgcgcaaacaggtgtctggtatcgctcctaactttgtacacagcctggacggtaaccaccttcgtatgactgtagtgtgggcacacgagaagtacggaatcgaatcttttgcactgattcacgactccttcggtaccattccggctgacgctgcgaacctgttcaaagcagtgcgcgaaactttcgttgacacatatgagtcttgtgatgtactggctgatttctacgaccagattgctgaccagttgcacgagtctcaacgcgacaaaatgccagcacttccggctaaaggtaacttgaacctccgtgacatcttaaaatcggacttcgcgttcgcg

SEQ ID NO: 1916 - protein, 890 aa, synthetic construct
  REGION 1..890: note = Variant of RNA polymerase
MHHHHHHMNTINIAKNDFSDIELAAIPFNTLADHYGERLAREQLALEHESYEMGEARFRKMFERQLKAGEVADNAAAKPLITTLLPKMIARINDWFEEVKAKRGKRPTAFQFLQEIKPEAVAYITIKTTLACLTSADNTTVQAVASAIGKAIEDEARFGRIRDLEAKHFKKNVEEQLNKRVGHVYKKAFMQVVEHDMLSKGLLGGVVWSSWHKEDSIHVGVRCIEMLIESTGMVSLHRQNAGVVGQDSERIELAPEYAEAIATRAGALAGISPMFQPCVVPPKPWTGITGGGYWAAGRKPLQLVRTRSLAALRRYEEVSMPEVIKAVNIAQNTAWRINKKVLDVANTITQWKHCPVADIPAMDRGEMPARPLDIDTNEIALKAWKKEASAFYRKDKARVSRRLSMEFMLSQANKFANYEAIWFPWNMDWRGRVYAVPMFNPQGNDMTKGLLTFAQEKPIGEDGFYWLKIHGANTAGVDKVPFPQRIKFVEDNHTNIMECAKAPLENTWWAEQDSPFCFLAFCFEYAGVINSGLSYNCSLPLAFDGSCSGLQHFSAMLRDEIGGKAVNLLPSAEYQDIYRIVSDKVNEMLKQDLINGTSTTVETVTDKKTGEITQRTKYGTKVMAQWWLEHGVNRGVTKRSVMTLVYGALEFGFRDQVLSDTIQKAIDNGKGDMFLNPNQAAGYMAKLIWNAVSGTCVAAVEAMNWLKSAAKLLAAEVKDRKTDTVLRGRCAVHWVTPDGFPVWQEYKKPIQTRLNLMFLGQFRLQPTINTNKDSEIDARKQVSGIAPNFVHSLDGNHLRMTVVWAHEKYGIESFALIHDSFGTIPADAANLFKAVRETFVDTYESCDVLADFYDQIADQLHESQRDKMPALPAKGNLNLRDILKSDFAFA

SEQ ID NO: 1917 - DNA, 2670 bp, synthetic construct
  misc_feature 1..2670: note = Variant of RNA polymerase
  source 1..2670: mol_type = other DNA
atgcaccatcaccatcaccatatgaacacgattaacattgctaagaacgacttctctgacatcgaactggctgctatcccgttcaacactctggctgaccattacggtgagcgtttagctcgcgaacagttggcccttgagcatgagtcttacgagatgggtgaagcacgcttccgcaagatgtttgagcgtcaacttaaagctggtgaggttgcggataacgctgccgccaagcctctcatcactaccctactccctaagatgattgcacgcatcaacgactggtttgaggaagtgaaagccaagcgcggcaagcgcccgacagccttccagttcctgcaagaaatcaagccggaagccgtagcgtacatcaccattaagaccactctggcttgcctaaccagtgcggacaatacaaccgttcaggctgtagcaagcgcaatcggtaaagccattgaggacgaggctcgcttcggtcgtatccgtgaccttgaagctaagcacttcaagaagaacgttgaggaacaactcaacaagcgcgtagggcacgtctacaagaaagcatttatgcaagttgtcgagcacgacatgctctctaagggtctactcgggggcgtggtatggtcgtcgtggcataaggaagactctattcatgtaggagtacgctgcatcgagatgctcattgagtcaaccggaatggttagcttacaccgccaaaatgctggcgtagtaggtcaagactctgagcgtatcgaactcgcacctgaatacgctgaggctatcgcaacccgtgcaggtgcgctggctggcatctctccgatgttccaaccttgcgtagttcctcctaagccgtggactggcattactggtggtggctattgggctgcggggcgcaaacccctgcagttagtacgtactcgcagtctggcggcgcttcgccgctatgaagaagtgtcgatgccggaggtcatcaaagcagtcaacattgcgcagaatacagcatggcgtattaacaagaaagttctcgacgtagcgaataccatcacccaatggaaacactgtccagtcgcagatatccctgcgatggatcgtggcgaaatgccagctcgtccgttggacatcgataccaacgagattgcacttaaagcgtggaagaaagaagcttccgcgttctaccgcaaagacaaagcacgcgttagccgtcgtctgtcaatggagtttatgttatctcaggcgaacaagtttgcgaattatgaggcaatctggtttccgtggaacatggattggcgtgggcgcgtgtacgctgtcccgatgttcaatcctcagggcaacgatatgacgaaaggcacgctgacctttgcgcaggagaaacccattggtgaagacggcttctattggctcaagattcatggcgcaaatacagctggagtggataaagtaccgtttccacaacgcatcaaatttgttgaggataaccatacgaatattatggaatgcgcgaaagcaccgctggaaaacacttggtgggcggaacaggactcgccgttctgctttctggcgttctgctttgagtatgctggcgtcatcaatagtggtctgtcgtacaactgtagcttgcctctggcattcgatggtagttgctccggcctgcaacatttctcagcgatgttacgcgacgaaattggcggcaaagctgtgaatctcctcccatctgcggaataccaggatatttatcgtatcgtcagcgacaaagttaacgagatgctgaaacaagatctgattaacggtacctctaccaccgtggaaacggtgactgataagaagacaggcgaaattacccaacgcacgaaatacgggaccaaagttatggcacagtggtggttagaacacggtgtgaatcgtggcgtcacgaaacgctcggttatgactttggtgtatggggcgctggagtttggattccgcgatcaagtgctgagtgacaccattcaaaaagcgatcgataacggcaagggtgacatgtttctgaatccgaatcaggctgctggttacatggcgaaactgatctggaacgcagtgtccgggaccgtagtcgcagcagttgaggcgatgaactggctgaaaagtgcggcgaaattacttgctgctgaagtgaaggatcgtaagacggatacagttctgcgtggccgctgcgcagtacattgggtgactcccgacggcttccctgtgtggcaggaatacaagaagcctattcagacgcgcttgaacctgatgttcctcggtcagttccgcttacagcctaccattaacaccaacaaagatagcgagattgatgcgcgcaaacaggtgtctggtatcgctcctaactttgtacacagcctggacggtaaccaccttcgtatgactgtagtgtgggcacacgagaagtacggaatcgaatcttttgcactgattcacgactccttcggtaccattccggctgacgctgcgaacctgttcaaagcagtgcgcgaaactttcgttgacacatatgagtcttgtgatgtactggctgatttctacgaccagattgctgaccagttgcacgagtctcaacgcgacaaaatgccagcacttccggctaaaggtaacttgaacctccgtgacatcttaaaatcggacttcgcgttcgcg

SEQ ID NO: 1918 - protein, 890 aa, synthetic construct
  REGION 1..890: note = Variant of RNA polymerase
MHHHHHHMNTINIAKNDFSDIELAAIPFNTLADHYGERLAREQLALEHESYEMGEARFRKMFERQLKAGEVADNAAAKPLITTLLPKMIARINDWFEEVKAKRGKRPTAFQFLQEIKPEAVAYITIKTTLACLTSADNTTVQAVASAIGKAIEDEARFGRIRDLEAKHFKKNVEEQLNKRVGHVYKKAFMQVVEHDMLSKGLLGGVVWSSWHKEDSIHVGVRCIEMLIESTGMVSLHRQNAGVVGQDSERIELAPEYAEAIATRAGALAGISPMFQPCVVPPKPWTGITGGGYWAAGRKPLQLVRTRSLAALRRYEEVSMPEVIKAVNIAQNTAWRINKKVLDVANTITQWKHCPVADIPAMDRGEMPARPLDIDTNEIALKAWKKEASAFYRKDKARVSRRLSMEFMLSQANKFANYEAIWFPWNMDWRGRVYAVPMFNPQGNDMTKGTLTFAQEKPIGEDGFYWLKIHGANTAGVDKVPFPQRIKFVEDNHTNIMECAKAPLENTWWAEQDSPFCFLAFCFEYAGVINSGLSYNCSLPLAFDGSCSGLQHFSAMLRDEIGGKAVNLLPSAEYQDIYRIVSDKVNEMLKQDLINGTSTTVETVTDKKTGEITQRTKYGTKVMAQWWLEHGVNRGVTKRSVMTLVYGALEFGFRDQVLSDTIQKAIDNGKGDMFLNPNQAAGYMAKLIWNAVSGTVVAAVEAMNWLKSAAKLLAAEVKDRKTDTVLRGRCAVHWVTPDGFPVWQEYKKPIQTRLNLMFLGQFRLQPTINTNKDSEIDARKQVSGIAPNFVHSLDGNHLRMTVVWAHEKYGIESFALIHDSFGTIPADAANLFKAVRETFVDTYESCDVLADFYDQIADQLHESQRDKMPALPAKGNLNLRDILKSDFAFA

SEQ ID NO: 1919 - DNA, 2670 bp, synthetic construct
  misc_feature 1..2670: note = Variant of RNA polymerase
  source 1..2670: mol_type = other DNA
atgcaccatcaccatcaccatatgaacacgattaacattgctaagaacgacttctctgacatcgaactggctgctatcccgttcaacactctggctgaccattacggtgagcgtttagctcgcgaacagttggcccttgagcatgagtcttacgagatgggtgaagcacgcttccgcaagatgtttgagcgtcaacttaaagctggtgaggttgcggataacgctgccgccaagcctctcatcactaccctactccctaagatgattgcacgcatcaacgactggtttgaggaagtgaaagccaagcgcggcaagcgcccgacagccttccagttcctgcaagaaatcaagccggaagccgtagcgtacatcaccattaagaccactctggcttgcctaaccagtgcggacaatacaaccgttcaggctgtagcaagcgcaatcggtaaagccattgaggacgaggctcgcttcggtcgtatccgtgaccttgaagctaagcacttcaagaagaacgttgaggaacaactcaacaagcgcgtagggcacgtctacaagaaagcatttatgcaagttgtcgagcacgacatgctctctaagggtctactcgggggcgtggtatggtcgtcgtggcataaggaagactctattcatgtaggagtacgctgcatcgagatgctcattgagtcaaccggaatggttagcttacaccgccaaaatgctggcgtagtaggtcaagactctgagcgtatcgaactcgcacctgaatacgctgaggctatcgcaacccgtgcaggtgcgctggctggcatctctccgatgttccaaccttgcgtagttcctcctaagccgtggactggcattactggtggtggctattgggctgcggggcgcaaacccctgcagttagtacgtactcgcagtctggcggcgcttcgccgctatgaagaagtgtcgatgccggaggtcatcaaagcagtcaacattgcgcagaatacagcatggcgtattaacaagaaagttctcgacgtagcgaataccatcacccaatggaaacactgtccagtcgcagatatccctgcgatggatcgtggcgaaatgccagctcgtccgttggacatcgataccaacgagattgcacttaaagcgtggaagaaagaagcttccgcgttctaccgcaaagacaaaggtcgcgttagccgtcgtctgtcaatggagtttatgttatctcaggcgaacaagtttgcgaattatgaggcaatctggtttccgtggaacatggattggcgtgggcgcgtgtacgctgtcccgatgttcaatcctcagggcaacgatatgacgaaaggcctgctgacctttgcgcaggagaaacccattggtgaagacggcttctattggctcaagattcatggcgcaaatacagctggagtggataaagtaccgtttccacaacgcatcaaatttgttgaggataaccatacgaatattatggaatgcgcgaaagcaccgctggaaaacacttggtgggcggaacaggactcgccgttctgctttctggcgttctgctttgagtatgctggcgtcatcaatagtggtctgtcgtacaactgtagcttgcctctggcattcgatggtagttgctccggcctgcaacatttctcagcgatgttacgcgacgaaattggcggcaaagctgtgaatctcctcccatctgcggaataccaggatatttatcgtatcgtcagcgacaaagttaacgagatgctgaaacaagatctgattaacggtacctctaccaccgtggaaacggtgactgataagaagacaggcgaaattacccaacgcacgaaatacgggaccaaagttatggcacagtggtggttagaacacggtgtgaatcgtggcgtcacgaaacgctcggttatgactttggtgtatggggcgctggagtttggattccgcgatcaagtgctgagtgacaccattcaaaaagcgatcgataacggcaagggtgacatgtttctgaatccgaatcaggctgctggttacatggcgaaactgatctggaacgcagtgtccgggaccgtagtcgcagcagttgaggcgatgaactggctgaaaagtgcggcgaaattacttgctgctgaagtgaaggatcgtaagacggatacagttctgcgtggccgctgcgcagtacattgggtgactcccgacggcttccctgtgtggcaggaatacaagaagcctattcagacgcgcttgaacctgatgttcctcggtcagttccgcttacagcctaccattaacaccgacaaagatagcgagattgatgcgcgcaaacaggtgtctggtatcgctcctaactttgtacacagcctggacggtaaccaccttcgtatgactgtagtgtgggcacacgagaagtacggaatcgaatcttttgcactgattcacgactccttcggtaccattccggctgacgctgcgaacctgttcaaagcagtgcgcgaaactttcgttgacacatatgagtcttgtgatgtactggctgatttctacgaccagattgctgaccagttgcacgagtctcaacgcgacaaaatgccagcacttccggctaaaggtaacttgaacctccgtgacatcttaaaatcggacttcgcgttcgcg

SEQ ID NO: 1920 - protein, 890 aa, synthetic construct
  REGION 1..890: note = Variant of RNA polymerase
MHHHHHHMNTINIAKNDFSDIELAAIPFNTLADHYGERLAREQLALEHESYEMGEARFRKMFERQLKAGEVADNAAAKPLITTLLPKMIARINDWFEEVKAKRGKRPTAFQFLQEIKPEAVAYITIKTTLACLTSADNTTVQAVASAIGKAIEDEARFGRIRDLEAKHFKKNVEEQLNKRVGHVYKKAFMQVVEHDMLSKGLLGGVVWSSWHKEDSIHVGVRCIEMLIESTGMVSLHRQNAGVVGQDSERIELAPEYAEAIATRAGALAGISPMFQPCVVPPKPWTGITGGGYWAAGRKPLQLVRTRSLAALRRYEEVSMPEVIKAVNIAQNTAWRINKKVLDVANTITQWKHCPVADIPAMDRGEMPARPLDIDTNEIALKAWKKEASAFYRKDKGRVSRRLSMEFMLSQANKFANYEAIWFPWNMDWRGRVYAVPMFNPQGNDMTKGLLTFAQEKPIGEDGFYWLKIHGANTAGVDKVPFPQRIKFVEDNHTNIMECAKAPLENTWWAEQDSPFCFLAFCFEYAGVINSGLSYNCSLPLAFDGSCSGLQHFSAMLRDEIGGKAVNLLPSAEYQDIYRIVSDKVNEMLKQDLINGTSTTVETVTDKKTGEITQRTKYGTKVMAQWWLEHGVNRGVTKRSVMTLVYGALEFGFRDQVLSDTIQKAIDNGKGDMFLNPNQAAGYMAKLIWNAVSGTVVAAVEAMNWLKSAAKLLAAEVKDRKTDTVLRGRCAVHWVTPDGFPVWQEYKKPIQTRLNLMFLGQFRLQPTINTDKDSEIDARKQVSGIAPNFVHSLDGNHLRMTVVWAHEKYGIESFALIHDSFGTIPADAANLFKAVRETFVDTYESCDVLADFYDQIADQLHESQRDKMPALPAKGNLNLRDILKSDFAFA

SEQ ID NO: 1921 - DNA, 2670 bp, synthetic construct
  misc_feature 1..2670: note = Variant of RNA polymerase
  source 1..2670: mol_type = other DNA
atgcaccatcaccatcaccatatgaacacgattaacattgctaagaacgacttctctgacatcgaactggctgctatcccgttcaacactctggctgaccattacggtgagcgtttagctcgcgaacagttggcccttgagcatgagtcttacgagatgggtgaagcacgcttccgcaagatgtttgagcgtcaacttaaagctggtgaggttgcggataacgctgccgccaagcctctcatcactaccctactccctaagatgattgcacgcatcaacgactggtttgaggaagtgaaagccaagcgcggcaagcgcccgacagccttccagttcctgcaagaaatcaagccggaagccgtagcgtacatcaccattaagaccactctggcttgcctaaccagtgcggacaatacaaccgttcaggctgtagcaagcgcaatcggtaaagccattgaggacgaggctcgcttcggtcgtatccgtgaccttgaagctaagcacttcaagaagaacgttgaggaacaactcaacaagcgcgtagggcacgtctacaagaaagcatttatgcaagttgtcgagcacgacatgctctctaagggtctactcgggggcgtggtatggtcgtcgtggcataaggaagactctattcatgtaggagtacgctgcatcgagatgctcattgagtcaaccggaatggttagcttacaccgccaaaatgctggcgtagtaggtcaagactctgagcgtatcgaactcgcacctgaatacgctgaggctatcgcaacccgtgcaggtgcgctggctggcatctctccgatgttccaaccttgcgtagttcctcctaagccgtggactggcattactggtggtggctattgggctgcggggcgcaaacccctgcagttagtacgtactcgcagtctggcggcgcttcgccgctatgaagaagtgtcgatgccggaggtcatcaaagcagtcaacattgcgcagaatacagcatggcgtattaacaagaaagttctcgacgtagcgaataccatcacccaatggaaacactgtccagtcgcagatatccctgcgatggatcgtggcgaaatgccagctcgtccgttggacatcgataccaacgagattgcacttaaagcgtggaagaaagaagcttccgcgttctaccgcaaagacaaagagcgcgttagccgtcgtctgtcaatggagtttatgttatctcaggcgaacaagtttgcgaattatgaggcaatctggtttccgtggaacatggattggcgtgggcgcgtgtacgctgtcccgatgttcaatcctcagggcaacgatatgacgaaaggcctgctgacctttgcgcaggagaaacccattggtgaagacggcttctattggctcaagattcatggcgcaaatacagctggagtggataaagtaccgtttccacaacgcatcaaatttgttgaggataaccatacgaatattatggaatgcgcgaaagcaccgctggaaaacacttggtgggcggaacaggactcgccgttctgctttctggcgttctgctttgagtatgctggcgtcatcaatagtggtctgtcgtacaactgtagcttgcctctggcattcgatggtagttgctccggcctgcaacatttctcagcgatgttacgcgacgaaattggcggcaaagctgtgaatctcctcccatctgcggaataccaggatatttatcgtatcgtcagcgacaaagttaacgagatgctgaaacaagatctgattaacggtacctctaccaccgtggaaacggtgactgataagaagacaggcgaaattacccaacgcacgaaatacgggaccaaagttatggcacagtggtggttagaacacggtgtgaatcgtggcgtcacgaaacgctcggttatgactttggtgtatggggcgctggagtttggattccgcgatcaagtgctgagtgacaccattcaaaaagcgatcgataacggcaagggtgacatgtttctgaatccgaatcaggctgctggttacatggcgaaactgatctggaacgcagtgtccgggaccgtagtcgcagcagttgaggcgatgaactggctgaaaagtgcggcgaaattacttgctgctgaagtgaaggatcgtaagacggatacagttctgcgtggccgctgcgcagtacattgggtgactcccgacggcttccctgtgtggcaggaatacaagaagcctattcagacgcgcttgaacctgatgttcctcggtcagttccgcttacagcctaccattaacaccaacaaagatagcgagattgatgcgcgcaaacaggtgtctggtatcgctcctaactttgtacacagcctggacggtaaccaccttcgtatgactgtagtgtgggcacacgagaagtacggaatcgaatcttttgcactgattcacgactccttcggtaccattccggctgacgctgcgaacctgttcaaagcagtgcgcgaaactttcgttgacacatatgagtcttgtgatgtactggctgatttctacgaccagattgctgaccagttgcacgagtctcaacgcgacaaaatgccagcacttccggctaaaggtaacttgaacctccgtgacatcttaaaatcggacttcgcgttcgcg

SEQ ID NO: 1922 - protein, 890 aa, synthetic construct
  REGION 1..890: note = Variant of RNA polymerase
MHHHHHHMNTINIAKNDFSDIELAAIPFNTLADHYGERLAREQLALEHESYEMGEARFRKMFERQLKAGEVADNAAAKPLITTLLPKMIARINDWFEEVKAKRGKRPTAFQFLQEIKPEAVAYITIKTTLACLTSADNTTVQAVASAIGKAIEDEARFGRIRDLEAKHFKKNVEEQLNKRVGHVYKKAFMQVVEHDMLSKGLLGGVVWSSWHKEDSIHVGVRCIEMLIESTGMVSLHRQNAGVVGQDSERIELAPEYAEAIATRAGALAGISPMFQPCVVPPKPWTGITGGGYWAAGRKPLQLVRTRSLAALRRYEEVSMPEVIKAVNIAQNTAWRINKKVLDVANTITQWKHCPVADIPAMDRGEMPARPLDIDTNEIALKAWKKEASAFYRKDKERVSRRLSMEFMLSQANKFANYEAIWFPWNMDWRGRVYAVPMFNPQGNDMTKGLLTFAQEKPIGEDGFYWLKIHGANTAGVDKVPFPQRIKFVEDNHTNIMECAKAPLENTWWAEQDSPFCFLAFCFEYAGVINSGLSYNCSLPLAFDGSCSGLQHFSAMLRDEIGGKAVNLLPSAEYQDIYRIVSDKVNEMLKQDLINGTSTTVETVTDKKTGEITQRTKYGTKVMAQWWLEHGVNRGVTKRSVMTLVYGALEFGFRDQVLSDTIQKAIDNGKGDMFLNPNQAAGYMAKLIWNAVSGTVVAAVEAMNWLKSAAKLLAAEVKDRKTDTVLRGRCAVHWVTPDGFPVWQEYKKPIQTRLNLMFLGQFRLQPTINTNKDSEIDARKQVSGIAPNFVHSLDGNHLRMTVVWAHEKYGIESFALIHDSFGTIPADAANLFKAVRETFVDTYESCDVLADFYDQIADQLHESQRDKMPALPAKGNLNLRDILKSDFAFA

SEQ ID NO: 1923 - DNA, 2670 bp, synthetic construct
  misc_feature 1..2670: note = Variant of RNA polymerase
  source 1..2670: mol_type = other DNA
atgcaccatcaccatcaccatatgaacacgattaacattgctaagaacgacttctctgacatcgaactggctgctatcccgttcaacactctggctgaccattacggtgagcgtttagctcgcgaacagttggcccttgagcatgagtcttacgagatgggtgaagcacgcttccgcaagatgtttgagcgtcaacttaaagctggtgaggttgcggataacgctgccgccaagcctctcatcactaccctactccctaagatgattgcacgcatcaacgactggtttgaggaagtgaaagccaagcgcggcaagcgcccgacagccttccagttcctgcaagaaatcaagccggaagccgtagcgtacatcaccattaagaccactctggcttgcctaaccagtgcggacaatacaaccgttcaggctgtagcaagcgcaatcggtaaagccattgaggacgaggctcgcttcggtcgtatccgtgaccttgaagctaagcacttcaagaagaacgttgaggaacaactcaacaagcgcgtagggcacgtctacaagaaagcatttatgcaagttgtcgagcacgacatgctctctaagggtctactcgggggcgtggtatggtcgtcgtggcataaggaagactctattcatgtaggagtacgctgcatcgagatgctcattgagtcaaccggaatggttagcttacaccgccaaaatgctggcgtagtaggtcaagactctgagcgtatcgaactcgcacctgaatacgctgaggctatcgcaacccgtgcaggtgcgctggctggcatctctccgatgttccaaccttgcgtagttcctcctaagccgtggactggcattactggtggtggctattgggctgcggggcgcaaacccctgcagttagtacgtactcgcagtctggcggcgcttcgccgctatgaagaagtgtcgatgccggaggtcatcaaagcagtcaacattgcgcagaatacagcatggcgtattaacaagaaagttctcgacgtagcgaataccatcacccaatggaaacactgtccagtcgcagatatccctgcgatggatcgtggcgaaatgccagctcgtccgttggacatcgataccaacgagattgcacttaaagcgtggaagaaagaagcttccgcgttctaccgcaaagacaaagcacgcgttagccgtctgctgtcaatggagtttatgttatctcaggcgaacaagtttgcgaattatgaggcaatctggtttccgtggaacatggattggcgtgggcgcgtgtacgctgtcccgatgttcaatcctcagggcaacgatatgacgaaaggcctgctgacctttgcgcaggagaaacccattggtgaagacggcttctattggctcaagattcatggcgcaaatacagctggagtggataaagtaccgtttccacaacgcatcaaatttgttgaggataaccatacgaatattatggaatgcgcgaaagcaccgctggaaaacacttggtgggcggaacaggactcgccgttctgctttctggcgttctgctttgagtatgctggcgtcatcaatagtggtctgtcgtacaactgtagcttgcctctggcattcgatggtagttgctccggcctgcaacatttctcagcgatgttacgcgacgaaattggcggcaaagctgtgaatctcctcccatctgcggaataccaggatatttatcgtatcgtcagcgacaaagttaacgagatgctgaaacaagatctgattaacggtacctctaccaccgtggaaacggtgactgataagaagacaggcgaaattacccaacgcacgaaatacgggaccaaagttatggcacagtggtggttagaacacggtgtgaatcgtggcgtcacgaaacgctcggttatgactttggtgtatggggcgctggagtttggattccgcgatcaagtgctgagtgacaccattcaaaaagcgatcgataacggcaagggtgacatgtttctgaatccgaatcaggctgctggttacatggcgaaactgatctggaacgcagtgtccgggaccgtagtcgcagcagttgaggcgatgaactggctgaaaagtgcggcgaaattacttgctgctgaagtgaaggatcgtaagacggatacagttctgcgtggccgctgcgcagtacattgggtgactcccgacggcttccctgtgtggcaggaatacaagaagcctattcagacgcgcttgaacctgatgttcctcggtcagttccgcttacagcctaccattaacaccaacaaagatagcgagattgatgcgcgcaaacaggtgtctggtatcgctcctaactttgtacacagcctggacggtaaccaccttcgtatgactgtagtgtgggcacacgagaagtacggaatcgaatcttttgcactgattcacgactccttcggtaccattccggctgacgctgcgaacctgttcaaagcagtgcgcgaaactttcgttgacacatatgagtcttgtgatgtactggctgatttctacgaccagattgctgaccagttgcacgagtctcaacgcgacaaaatgccagcacttccggctaaaggtaacttgaacctccgtgacatcttaaaatcggacttcgcgttcgcg

SEQ ID NO: 1924 - protein, 890 aa, synthetic construct
  REGION 1..890: note = Variant of RNA polymerase
MHHHHHHMNTINIAKNDFSDIELAAIPFNTLADHYGERLAREQLALEHESYEMGEARFRKMFERQLKAGEVADNAAAKPLITTLLPKMIARINDWFEEVKAKRGKRPTAFQFLQEIKPEAVAYITIKTTLACLTSADNTTVQAVASAIGKAIEDEARFGRIRDLEAKHFKKNVEEQLNKRVGHVYKKAFMQVVEHDMLSKGLLGGVVWSSWHKEDSIHVGVRCIEMLIESTGMVSLHRQNAGVVGQDSERIELAPEYAEAIATRAGALAGISPMFQPCVVPPKPWTGITGGGYWAAGRKPLQLVRTRSLAALRRYEEVSMPEVIKAVNIAQNTAWRINKKVLDVANTITQWKHCPVADIPAMDRGEMPARPLDIDTNEIALKAWKKEASAFYRKDKARVSRLLSMEFMLSQANKFANYEAIWFPWNMDWRGRVYAVPMFNPQGNDMTKGLLTFAQEKPIGEDGFYWLKIHGANTAGVDKVPFPQRIKFVEDNHTNIMECAKAPLENTWWAEQDSPFCFLAFCFEYAGVINSGLSYNCSLPLAFDGSCSGLQHFSAMLRDEIGGKAVNLLPSAEYQDIYRIVSDKVNEMLKQDLINGTSTTVETVTDKKTGEITQRTKYGTKVMAQWWLEHGVNRGVTKRSVMTLVYGALEFGFRDQVLSDTIQKAIDNGKGDMFLNPNQAAGYMAKLIWNAVSGTVVAAVEAMNWLKSAAKLLAAEVKDRKTDTVLRGRCAVHWVTPDGFPVWQEYKKPIQTRLNLMFLGQFRLQPTINTNKDSEIDARKQVSGIAPNFVHSLDGNHLRMTVVWAHEKYGIESFALIHDSFGTIPADAANLFKAVRETFVDTYESCDVLADFYDQIADQLHESQRDKMPALPAKGNLNLRDILKSDFAFA

SEQ ID NO: 1925 - DNA, 2670 bp, synthetic construct
  misc_feature 1..2670: note = Variant of RNA polymerase
  source 1..2670: mol_type = other DNA
atgcaccatcaccatcaccatatgaacacgattaacattgctaagaacgacttctctgacatcgaactggctgctatcccgttcaacactctggctgaccattacggtgagcgtttagctcgcgaacagttggcccttgagcatgagtcttacgagatgggtgaagcacgcttccgcaagatgtttgagcgtcaacttaaagctggtgaggttgcggataacgctgccgccaagcctctcatcactaccctactccctaagatgattgcacgcatcaacgactggtttgaggaagtgaaagccaagcgcggcaagcgcccgacagccttccagttcctgcaagaaatcaagccggaagccgtagcgtacatcaccattaagaccactctggcttgcctaaccagtgcggacaatacaaccgttcaggctgtagcaagcgcaatcggtaaagccattgaggacgaggctcgcttcggtcgtatccgtgaccttgaagctaagcacttcaagaagaacgttgaggaacaactcaacaagcgcgtagggcacgtctacaagaaagcatttatgcaagttgtcgagcacgacatgctctctaagggtctactcgggggcgtggtatggtcgtcgtggcataaggaagactctattcatgtaggagtacgctgcatcgagatgctcattgagtcaaccggaatggttagcttacaccgccaaaatgctggcgtagtaggtcaagactctgagcgtatcgaactcgcacctgaatacgctgaggctatcgcaacccgtgcaggtgcgctggctggcatctctccgatgttccaaccttgcgtagttcctcctaagccgtggactggcattactggtggtggctattgggctgcggggcgcaaacccctgcagttagtacgtactcgcagtctggcggcgcttcgccgctatgaagaagtgtcgatgccggaggtcatcaaagcagtcaacattgcgcagaatacagcatggcgtattaacaagaaagttctcgacgtagcgaataccatcacccaatggaaacactgtccagtcgcagatatccctgcgatggatcgtggcgaaatgccagctcgtccgttggacatcgataccaacgatattgcacttaaagcgtggaagaaagaagcttccgcgttctaccgcaaagacaaagcacgcgttagccgtcgtctgtcaatggagtttatgttatctcaggcgaacaagtttgcgaattatgaggcaatctggtttccgtggaacatggattggcgtgggcgcgtgtacgctgtcccgatgttcaatcctcagggcaacgatatgacgaaaggcctgctgacctttgcgcaggagaaacccattggtgaagacggcttctattggctcaagattcatggcgcaaatacagctggagtggataaagtaccgtttccacaacgcatcaaatttgttgaggataaccatacgaatattatggaatgcgcgaaagcaccgctggaaaacacttggtgggcggaacaggactcgccgttctgctttctggcgttctgctttgagtatgctggcgtcatcaatagtggtctgtcgtacaactgtagcttgcctctggcattcgatggtagttgctccggcctgcaacatttctcagcgatgttacgcgacgaaattggcggcaaagctgtgaatctcctcccatctgcggaataccaggatatttatcgtatcgtcagcgacaaagttaacgagatgctgaaacaagatctgattaacggtacctctaccaccgtggaaacggtgactgataagaagacaggcgaaattacccaacgcacgaaatacgggaccaaagttatggcacagtggtggttagaacacggtgtgaatcgtggcgtcacgaaacgctcggttatgactttggtgtatggggcgctggagtttggattccgcgatcaagtgctgagtgacaccattcaaaaagcgatcgataacggcaagggtgacatgtttctgaatccgaatcaggctgctggttacatggcgaaactgatctggaacgcagtgtccgggaccgtagtcgcagcagttgaggcgatgaactggctgaaaagtgcggcgaaattacttgctgctgaagtgaaggatcgtaagacggatacagttctgcgtggccgctgcgcagtacattgggtgactcccgacggcttccctgtgtggcaggaatacaagaagcctattcagacgcgcttgaacctgatgttcctcggtcagttccgcttacagcctaccattaacaccaacaaagatagcgagattgatgcgcgcaaacaggtgtctggtatcgctcctaactttgtacacagcctggacggtaaccaccttcgtatgactgtagtgtgggcacacgagaagtacggaatcgaatcttttgcactgattcacgactccttcggtaccattccggctgacgctgcgaacctgttcaaagcagtgcgcgaaactttcgttgacacatatgagtcttgtgatgtactggctgatttctacgaccagattgctgaccagttgcacgagtctcaacgcgacaaaatgccagcacttccggctaaaggtaacttgaacctccgtgacatcttaaaatcggacttcgcgttcgcg

SEQ ID NO: 1926 - protein, 890 aa, synthetic construct
  REGION 1..890: note = Variant of RNA polymerase
MHHHHHHMNTINIAKNDFSDIELAAIPFNTLADHYGERLAREQLALEHESYEMGEARFRKMFERQLKAGEVADNAAAKPLITTLLPKMIARINDWFEEVKAKRGKRPTAFQFLQEIKPEAVAYITIKTTLACLTSADNTTVQAVASAIGKAIEDEARFGRIRDLEAKHFKKNVEEQLNKRVGHVYKKAFMQVVEHDMLSKGLLGGVVWSSWHKEDSIHVGVRCIEMLIESTGMVSLHRQNAGVVGQDSERIELAPEYAEAIATRAGALAGISPMFQPCVVPPKPWTGITGGGYWAAGRKPLQLVRTRSLAALRRYEEVSMPEVIKAVNIAQNTAWRINKKVLDVANTITQWKHCPVADIPAMDRGEMPARPLDIDTNDIALKAWKKEASAFYRKDKARVSRRLSMEFMLSQANKFANYEAIWFPWNMDWRGRVYAVPMFNPQGNDMTKGLLTFAQEKPIGEDGFYWLKIHGANTAGVDKVPFPQRIKFVEDNHTNIMECAKAPLENTWWAEQDSPFCFLAFCFEYAGVINSGLSYNCSLPLAFDGSCSGLQHFSAMLRDEIGGKAVNLLPSAEYQDIYRIVSDKVNEMLKQDLINGTSTTVETVTDKKTGEITQRTKYGTKVMAQWWLEHGVNRGVTKRSVMTLVYGALEFGFRDQVLSDTIQKAIDNGKGDMFLNPNQAAGYMAKLIWNAVSGTVVAAVEAMNWLKSAAKLLAAEVKDRKTDTVLRGRCAVHWVTPDGFPVWQEYKKPIQTRLNLMFLGQFRLQPTINTNKDSEIDARKQVSGIAPNFVHSLDGNHLRMTVVWAHEKYGIESFALIHDSFGTIPADAANLFKAVRETFVDTYESCDVLADFYDQIADQLHESQRDKMPALPAKGNLNLRDILKSDFAFA

SEQ ID NO: 1927 - DNA, 2670 bp, synthetic construct
  misc_feature 1..2670: note = Variant of RNA polymerase
  source 1..2670: mol_type = other DNA
atgcaccatcaccatcaccatatgaacacgattaacattgctaagaacgacttctctgacatcgaactggctgctatcccgttcaacactctggctgaccattacggtgagcgtttagctcgcgaacagttggcccttgagcatgagtcttacgagatgggtgaagcacgcttccgcaagatgtttgagcgtcaacttaaagctggtgaggttgcggataacgctgccgccaagcctctcatcactaccctactccctaagatgattgcacgcatcaacgactggtttgaggaagtgaaagccaagcgcggcaagcgcccgacagccttccagttcctgcaagaaatcaagccggaagccgtagcgtacatcaccattaagaccactctggcttgcctaaccagtgcggacaatacaaccgttcaggctgtagcaagcgcaatcggtaaagccattgaggacgaggctcgcttcggtcgtatccgtgaccttgaagctaagcacttcaagaagaacgttgaggaacaactcaacaagcgcgtagggcacgtctacaagaaagcatttatgcaagttgtcgagcacgacatgctctctaagggtctactcgggggcgtggtatggtcgtcgtggcataaggaagactctattcatgtaggagtacgctgcatcgagatgctcattgagtcaaccggaatggttagcttacaccgccaaaatgctggcgtagtaggtcaagactctgagcgtatcgaactcgcacctgaatacgctgaggctatcgcaacccgtgcaggtgcgctggctggcatctctccgatgttccaaccttgcgtagttcctcctaagccgtggactggcattactggtggtggctattgggctgcggggcgcaaacccctgcagttagtacgtactcgcagtctggcggcgcttcgccgctatgaagaagtgtcgatgccggaggtcatcaaagcagtcaacattgcgcagaatacagcatggcgtattaacaagaaagttctcgacgtagcgaataccatcacccaatggaaacactgtccagtcgcagatatccctgcgatggatcgtggcgaaatgccagctcgtccgttggacatcgataccaacgagattgcacttaaagcgtggaagaaagaagcttccgcgttctaccgcaaagaccgggcacgcgttagccgtcgtctgtcaatggagtttatgttatctcaggcgaacaagtttgcgaattatgaggcaatctggtttccgtggaacatggattggcgtgggcgcgtgtacgctgtcccgatgttcaatcctcagggcaacgatatgacgaaaggcctgctgacctttgcgcaggagaaacccattggtgaagacggcttctattggctcaagattcatggcgcaaatacagctggagtggataaagtaccgtttccacaacgcatcaaatttgttgaggataaccatacgaatattatggaatgcgcgaaagcaccgctggaaaacacttggtgggcggaacaggactcgccgttctgctttctggcgttctgctttgagtatgctggcgtcatcaatagtggtctgtcgtacaactgtagcttgcctctggcattcgatggtagttgctccggcctgcaacatttctcagcgatgttacgcgacgaaattggcggcaaagctgtgaatctcctcccatctgcggaataccaggatatttatcgtatcgtcagcgacaaagttaacgagatgctgaaacaagatctgattaacggtacctctaccaccgtggaaacggtgactgataagaagacaggcgaaattacccaacgcacgaaatacgggaccaaagttatggcacagtggtggttagaacacggtgtgaatcgtggcgtcacgaaacgctcggttatgactttggtgtatggggcgctggagtttggattccgcgatcaagtgctgagtgacaccattcaaaaagcgatcgataacggcaagggtgacatgtttctgaatccgaatcaggctgctggttacatggcgaaactgatctggaacgcagtgtccgggaccgtagtcgcagcagttgaggcgatgaactggctgaaaagtgcggcgaaattacttgctgctgaagtgaaggatcgtaagacggatacagttctgcgtggccgctgcgcagtacattgggtgactcccgacggcttccctgtgtggcaggaatacaagaagcctattcagacgcgcttgaacctgatgttcctcggtcagttccgcttacagcctaccattaacaccaacaaagatagcgagattgatgcgcgcaaacaggtgtctggtatcgctcctaactttgtacacagcctggacggtaaccaccttcgtatgactgtagtgtgggcacacgagaagtacggaatcgaatcttttgcactgattcacgactccttcggtaccattccggctgacgctgcgaacctgttcaaagcagtgcgcgaaactttcgttgacacatatgagtcttgtgatgtactggctgatttctacgaccagattgctgaccagttgcacgagtctcaacgcgacaaaatgccagcacttccggctaaaggtaacttgaacctccgtgacatcttaaaatcggacttcgcgttcgcg

SEQ ID NO: 1928 - protein, 890 aa, synthetic construct
  REGION 1..890: note = Variant of RNA polymerase
MHHHHHHMNTINIAKNDFSDIELAAIPFNTLADHYGERLAREQLALEHESYEMGEARFRKMFERQLKAGEVADNAAAKPLITTLLPKMIARINDWFEEVKAKRGKRPTAFQFLQEIKPEAVAYITIKTTLACLTSADNTTVQAVASAIGKAIEDEARFGRIRDLEAKHFKKNVEEQLNKRVGHVYKKAFMQVVEHDMLSKGLLGGVVWSSWHKEDSIHVGVRCIEMLIESTGMVSLHRQNAGVVGQDSERIELAPEYAEAIATRAGALAGISPMFQPCVVPPKPWTGITGGGYWAAGRKPLQLVRTRSLAALRRYEEVSMPEVIKAVNIAQNTAWRINKKVLDVANTITQWKHCPVADIPAMDRGEMPARPLDIDTNEIALKAWKKEASAFYRKDRARVSRRLSMEFMLSQANKFANYEAIWFPWNMDWRGRVYAVPMFNPQGNDMTKGLLTFAQEKPIGEDGFYWLKIHGANTAGVDKVPFPQRIKFVEDNHTNIMECAKAPLENTWWAEQDSPFCFLAFCFEYAGVINSGLSYNCSLPLAFDGSCSGLQHFSAMLRDEIGGKAVNLLPSAEYQDIYRIVSDKVNEMLKQDLINGTSTTVETVTDKKTGEITQRTKYGTKVMAQWWLEHGVNRGVTKRSVMTLVYGALEFGFRDQVLSDTIQKAIDNGKGDMFLNPNQAAGYMAKLIWNAVSGTVVAAVEAMNWLKSAAKLLAAEVKDRKTDTVLRGRCAVHWVTPDGFPVWQEYKKPIQTRLNLMFLGQFRLQPTINTNKDSEIDARKQVSGIAPNFVHSLDGNHLRMTVVWAHEKYGIESFALIHDSFGTIPADAANLFKAVRETFVDTYESCDVLADFYDQIADQLHESQRDKMPALPAKGNLNLRDILKSDFAFA

SEQ ID NO: 1929 - DNA, 2670 bp, synthetic construct
  misc_feature 1..2670: note = Variant of RNA polymerase
  source 1..2670: mol_type = other DNA
atgcaccatcaccatcaccatatgaacacgattaacattgctaagaacgacttctctgacatcgaactggctgctatcccgttcaacactctggctgaccattacggtgagcgtttagctcgcgaacagttggcccttgagcatgagtcttacgagatgggtgaagcacgcttccgcaagatgtttgagcgtcaacttaaagctggtgaggttgcggataacgctgccgccaagcctctcatcactaccctactccctaagatgattgcacgcatcaacgactggtttgaggaagtgaaagccaagcgcggcaagcgcccgacagccttccagttcctgcaagaaatcaagccggaagccgtagcgtacatcaccattaagaccactctggcttgcctaaccagtgcggacaatacaaccgttcaggctgtagcaagcgcaatcggtaaagccattgaggacgaggctcgcttcggtcgtatccgtgaccttgaagctaagcacttcaagaagaacgttgaggaacaactcaacaagcgcgtagggcacgtctacaagaaagcatttatgcaagttgtcgagcacgacatgctctctaagggtctactcgggggcgtggtatggtcgtcgtggcataaggaagactctattcatgtaggagtacgctgcatcgagatgctcattgagtcaaccggaatggttagcttacaccgccaaaatgctggcgtagtaggtcaagactctgagcgtatcgaactcgcacctgaatacgctgaggctatcgcaacccgtgcaggtgcgctggctggcatctctccgatgttccaaccttgcgtagttcctcctaagccgtggactggcattactggtggtggctattgggctgcggggcgcaaacccctgcagttagtacgtactcgcagtctggcggcgcttcgccgctatgaagaagtgtcgatgccggaggtcatcaaagcagtcaacattgcgcagaatacagcatggcgtattaacaagaaagttctcgacgtagcgaataccatcacccaatggaaacactgtccagtcgcagatatccctgcgatggatcgtggcgaaatgccagctcgtccgttggacatcgataccaacgagattgcacttaaagcgtggaagaaagaagcttccgcgttctaccgcaaagacatggcacgcgttagccgtcgtctgtcaatggagtttatgttatctcaggcgaacaagtttgcgaattatgaggcaatctggtttccgtggaacatggattggcgtgggcgcgtgtacgctgtcccgatgttcaatcctcagggcaacgatatgacgaaaggcctgctgacctttgcgcaggagaaacccattggtgaagacggcttctattggctcaagattcatggcgcaaatacagctggagtggataaagtaccgtttccacaacgcatcaaatttgttgaggataaccatacgaatattatggaatgcgcgaaagcaccgctggaaaacacttggtgggcggaacaggactcgccgttctgctttctggcgttctgctttgagtatgctggcgtcatcaatagtggtctgtcgtacaactgtagcttgcctctggcattcgatggtagttgctccggcctgcaacatttctcagcgatgttacgcgacgaaattggcggcaaagctgtgaatctcctcccatctgcggaataccaggatatttatcgtatcgtcagcgacaaagttaacgagatgctgaaacaagatctgattaacggtacctctaccaccgtggaaacggtgactgataagaagacaggcgaaattacccaacgcacgaaatacgggaccaaagttatggcacagtggtggttagaacacggtgtgaatcgtggcgtcacgaaacgctcggttatgactttggtgtatggggcgctggagtttggattccgcgatcaagtgctgagtgacaccattcaaaaagcgatcgataacggcaagggtgacatgtttctgaatccgaatcaggctgctggttacatggcgaaactgatctggaacgcagtgtccgggaccgtagtcgcagcagttgaggcgatgaactggctgaaaagtgcggcgaaattacttgctgctgaagtgaaggatcgtaagacggatacagttctgcgtggccgctgcgcagtacattgggtgactcccgacggcttccctgtgtggcaggaatacaagaagcctattcagacgcgcttgaacctgatgttcctcggtcagttccgcttacagcctaccattaacaccaacaaagatagcgagattgatgcgcgcaaacaggtgtctggtatcgctcctaactttgtacacagcctggacggtaaccaccttcgtatgactgtagtgtgggcacacgagaagtacggaatcgaatcttttgcactgattcacgactccttcggtaccattccggctgacgctgcgaacctgttcaaagcagtgcgcgaaactttcgttgacacatatgagtcttgtgatgtactggctgatttctacgaccagattgctgaccagttgcacgagtctcaacgcgacaaaatgccagcacttccggctaaaggtaacttgaacctccgtgacatcttaaaatcggacttcgcgttcgcg

SEQ ID NO: 1930 - protein, 890 aa, synthetic construct
  REGION 1..890: note = Variant of RNA polymerase
MHHHHHHMNTINIAKNDFSDIELAAIPFNTLADHYGERLAREQLALEHESYEMGEARFRKMFERQLKAGEVADNAAAKPLITTLLPKMIARINDWFEEVKAKRGKRPTAFQFLQEIKPEAVAYITIKTTLACLTSADNTTVQAVASAIGKAIEDEARFGRIRDLEAKHFKKNVEEQLNKRVGHVYKKAFMQVVEHDMLSKGLLGGVVWSSWHKEDSIHVGVRCIEMLIESTGMVSLHRQNAGVVGQDSERIELAPEYAEAIATRAGALAGISPMFQPCVVPPKPWTGITGGGYWAAGRKPLQLVRTRSLAALRRYEEVSMPEVIKAVNIAQNTAWRINKKVLDVANTITQWKHCPVADIPAMDRGEMPARPLDIDTNEIALKAWKKEASAFYRKDMARVSRRLSMEFMLSQANKFANYEAIWFPWNMDWRGRVYAVPMFNPQGNDMTKGLLTFAQEKPIGEDGFYWLKIHGANTAGVDKVPFPQRIKFVEDNHTNIMECAKAPLENTWWAEQDSPFCFLAFCFEYAGVINSGLSYNCSLPLAFDGSCSGLQHFSAMLRDEIGGKAVNLLPSAEYQDIYRIVSDKVNEMLKQDLINGTSTTVETVTDKKTGEITQRTKYGTKVMAQWWLEHGVNRGVTKRSVMTLVYGALEFGFRDQVLSDTIQKAIDNGKGDMFLNPNQAAGYMAKLIWNAVSGTVVAAVEAMNWLKSAAKLLAAEVKDRKTDTVLRGRCAVHWVTPDGFPVWQEYKKPIQTRLNLMFLGQFRLQPTINTNKDSEIDARKQVSGIAPNFVHSLDGNHLRMTVVWAHEKYGIESFALIHDSFGTIPADAANLFKAVRETFVDTYESCDVLADFYDQIADQLHESQRDKMPALPAKGNLNLRDILKSDFAFA

SEQ ID NO: 1931 - DNA, 2670 bp, synthetic construct
  misc_feature 1..2670: note = Variant of RNA polymerase
  source 1..2670: mol_type = other DNA
atgcaccatcaccatcaccatatgaacacgattaacattgctaagaacgacttctctgacatcgaactggctgctatcccgttcaacactctggctgaccattacggtgagcgtttagctcgcgaacagttggcccttgagcatgagtcttacgagatgggtgaagcacgcttccgcaagatgtttgagcgtcaacttaaagctggtgaggttgcggataacgctgccgccaagcctctcatcactaccctactccctaagatgattgcacgcatcaacgactggtttgaggaagtgaaagccaagcgcggcaagcgcccgacagccttccagttcctgcaagaaatcaagccggaagccgtagcgtacatcaccattaagaccactctggcttgcctaaccagtgcggacaatacaaccgttcaggctgtagcaagcgcaatcggtaaagccattgaggacgaggctcgcttcggtcgtatccgtgaccttgaagctaagcacttcaagaagaacgttgaggaacaactcaacaagcgcgtagggcacgtctacaagaaagcatttatgcaagttgtcgagcacgacatgctctctaagggtctactcgggggcgtggtatggtcgtcgtggcataaggaagactctattcatgtaggagtacgctgcatcgagatgctcattgagtcaaccggaatggttagcttacaccgccaaaatgctggcgtagtaggtcaagactctgagcgtatcgaactcgcacctgaatacgctgaggctatcgcaacccgtgcaggtgcgctggctggcatctctccgatgttccaaccttgcgtagttcctcctaagccgtggactggcattactggtggtggctattgggctgcggggcgcaaacccctgcagttagtacgtactcgcagtctggcggcgcttcgccgctatgaagaagtgtcgatgccggaggtcatcaaagcagtcaacattgcgcagaatacagcatggcgtattaacaagaaagttctcgacgtagcgaataccatcacccaatggaaacactgtccagtcgcagatatccctgcgatggatcgtggcgaaatgccagctcgtccgttggacatcgataccaacgagattgcacttaaagcgtggaagaaagaagcttccgcgttctaccgcaaagacaaagcacgcgttagccgtcgtctgtcaatggagtttatgttatctcaggcgaacaagtttgcgaattatgaggcaatctggtttccgtggaacatggattggcgtgggcgcgtgtacgctgtcccgatgttcaatcctcagggcaacgatatgacgaaaggcctgctgacctttgcgcaggagaaacccattggtgaagacggcttctattggctcaagattcatggcgcaaatacagctggagtggataaagtaccgtttccacaacgcatcaaatttgttgaggataaccatacgaatattatggaatgcgcgaaagcaccgctggaaaacacttggtgggcggaacaggactcgccgttctgctttctggcgttctgctttgagtatgctggcgtcatcaatagtggtctgtcgtacaactgtagcttgcctctggcattcgatggtagttgctccggcctgcaacatttctcagcgatgttacgcgacgaaattggcggcaaagctgtgaatctcctcccatctgcggaataccaggatatttatcgtatcgtcagcgacaaagttaacgagatgctgaaacaagatctgattaacggtacctctaccaccgtggaaacggtgactgataagaagacaggcgaaattacccaacgcacgaaatacgggaccaaagttatggcacagtggtggttagaacacggtgtgaatcgtggcgtcacgaaacgctcggttatgactttggtgtatggggcgctggagtttggattccgcgatcaagtgctgagtgacaccattcaaaaagcgatcgataacggcaagggtgacatgtttctgaatccgaatcaggctgctggttacatggcgaaactgatctggaacgcagtgtccgggaccgtagtcgcagcagttgaggcgatgaactggctgaaaagtgcggcgaaattacttgctgctgaagtgaaggatcgtaagacggatacagttctgcgtggccgctgcgcagtacattgggtgactcccgacggcttccctgtgtggcaggaatacaagaagcctattcagacgcgcttgaacctgatgttcctcggtcagttccgcttacagcctaccattaacaccaacaaagatagcgagattgatgcgcgcaaacaggtgtctggtatcgctcctaactttgtacacagcctggacggtaaccaccttcgtatgactgtagtgtgggcacacgagaagtacggaatcgaatcttttgcactgattcacgactccttcggtaccattccggctgacgctgcgaacctgttcaaagcagtgcgcgaaactttcgttaatacatatgagtcttgtgatgtactggctgatttctacgaccagattgctgaccagttgcacgagtctcaacgcgacaaaatgccagcacttccggctaaaggtaacttgaacctccgtgacatcttaaaatcggacttcgcgttcgcg

SEQ ID NO: 1932 - protein, 890 aa, synthetic construct
  REGION 1..890: note = Variant of RNA polymerase
MHHHHHHMNTINIAKNDFSDIELAAIPFNTLADHYGERLAREQLALEHESYEMGEARFRKMFERQLKAGEVADNAAAKPLITTLLPKMIARINDWFEEVKAKRGKRPTAFQFLQEIKPEAVAYITIKTTLACLTSADNTTVQAVASAIGKAIEDEARFGRIRDLEAKHFKKNVEEQLNKRVGHVYKKAFMQVVEHDMLSKGLLGGVVWSSWHKEDSIHVGVRCIEMLIESTGMVSLHRQNAGVVGQDSERIELAPEYAEAIATRAGALAGISPMFQPCVVPPKPWTGITGGGYWAAGRKPLQLVRTRSLAALRRYEEVSMPEVIKAVNIAQNTAWRINKKVLDVANTITQWKHCPVADIPAMDRGEMPARPLDIDTNEIALKAWKKEASAFYRKDKARVSRRLSMEFMLSQANKFANYEAIWFPWNMDWRGRVYAVPMFNPQGNDMTKGLLTFAQEKPIGEDGFYWLKIHGANTAGVDKVPFPQRIKFVEDNHTNIMECAKAPLENTWWAEQDSPFCFLAFCFEYAGVINSGLSYNCSLPLAFDGSCSGLQHFSAMLRDEIGGKAVNLLPSAEYQDIYRIVSDKVNEMLKQDLINGTSTTVETVTDKKTGEITQRTKYGTKVMAQWWLEHGVNRGVTKRSVMTLVYGALEFGFRDQVLSDTIQKAIDNGKGDMFLNPNQAAGYMAKLIWNAVSGTVVAAVEAMNWLKSAAKLLAAEVKDRKTDTVLRGRCAVHWVTPDGFPVWQEYKKPIQTRLNLMFLGQFRLQPTINTNKDSEIDARKQVSGIAPNFVHSLDGNHLRMTVVWAHEKYGIESFALIHDSFGTIPADAANLFKAVRETFVNTYESCDVLADFYDQIADQLHESQRDKMPALPAKGNLNLRDILKSDFAFA

SEQ ID NO: 1933 - DNA, 2670 bp, synthetic construct
  misc_feature 1..2670: note = Variant of RNA polymerase
  source 1..2670: mol_type = other DNA
atgcaccatcaccatcaccatatgaacacgattaacattgctaagaacgacttctctgacatcgaactggctgctatcccgttcaacactctggctgaccattacggtgagcgtttagctcgcgaacagttggcccttgagcatgagtcttacgagatgggtgaagcacgcttccgcaagatgtttgagcgtcaacttaaagctggtgaggttgcggataacgctgccgccaagcctctcatcactaccctactccctaagatgattgcacgcatcaacgactggtttgaggaagtgaaagccaagcgcggcaagcgcccgacagccttccagttcctgcaagaaatcaagccggaagccgtagcgtacatcaccattaagaccactctggcttgcctaaccagtgcggacaatacaaccgttcaggctgtagcaagcgcaatcggtaaagccattgaggacgaggctcgcttcggtcgtatccgtgaccttgaagctaagcacttcaagaagaacgttgaggaacaactcaacaagcgcgtagggcacgtctacaagaaagcatttatgcaagttgtcgagcacgacatgctctctaagggtctactcgggggcgtggtatggtcgtcgtggcataaggaagactctattcatgtaggagtacgctgcatcgagatgctcattgagtcaaccggaatggttagcttacaccgccaaaatgctggcgtagtaggtcaagactctgagcgtatcgaactcgcacctgaatacgctgaggctatcgcaacccgtgcaggtgcgctggctggcatctctccgatgttccaaccttgcgtagttcctcctaagccgtggactggcattttgggtggtggctattgggctgcggggcgcaaacccctgcagttagtacgtactcgcagtctggcggcgcttcgccgctatgaagaagtgtcgatgccggaggtcatcaaagcagtcaacattgcgcagaatacagcatggcgtattaacaagaaagttctcgacgtagcgaataccatcacccaatggaaacactgtccagtcgcagatatccctgcgatggatcgtggcgaaatgccagctcgtccgttggacatcgataccaacgagattgcacttaaagcgtggaagaaagaagcttccgcgttctaccgcaaagacaaagcacgcgttagccgtcgtctgtcaatggagtttatgttatctcaggcgaacaagtttgcgaattatgaggcaatctggtttccgtggaacatggattggcgtgggcgcgtgtacgctgtcccgatgttcaatcctcagggcaacgatatgacgaaaggcctgctgacctttgcgcaggagaaacccattggtgaagacggcttctattggctcaagattcatggcgcaaatacagctggagtggataaagtaccgtttccacaacgcatcaaatttgttgaggataaccatacgaatattatggaatgcgcgaaagcaccgctggaaaacacttggtgggcggaacaggactcgccgttctgctttctggcgttctgctttgagtatgctggcgtcatcaatagtggtctgtcgtacaactgtagcttgcctctggcattcgatggtagttgctccggcctgcaacatttctcagcgatgttacgcgacgaaattggcggcaaagctgtgaatctcctcccatctgcggaataccaggatatttatcgtatcgtcagcgacaaagttaacgagatgctgaaacaagatctgattaacggtacctctaccaccgtggaaacggtgactgataagaagacaggcgaaattacccaacgcacgaaatacgggaccaaagttatggcacagtggtggttagaacacggtgtgaatcgtggcgtcacgaaacgctcggttatgactttggtgtatggggcgctggagtttggattccgcgatcaagtgctgagtgacaccattcaaaaagcgatcgataacggcaagggtgacatgtttctgaatccgaatcaggctgctggttacatggcgaaactgatctggaacgcagtgtccgggaccgtagtcgcagcagttgaggcgatgaactggctgaaaagtgcggcgaaattacttgctgctgaagtgaaggatcgtaagacggatacagttctgcgtggccgctgcgcagtacattgggtgactcccgacggcttccctgtgtggcaggaatacaagaagcctattcagacgcgcttgaacctgatgttcctcggtcagttccgcttacagcctaccattaacaccaacaaagatagcgagattgatgcgcgcaaacaggtgtctggtatcgctcctaactttgtacacagcctggacggtaaccaccttcgtatgactgtagtgtgggcacacgagaagtacggaatcgaatcttttgcactgattcacgactccttcggtaccattccggctgacgctgcgaacctgttcaaagcagtgcgcgaaactttcgttgacacatatgagtcttgtgatgtactggctgatttctacgaccagattgctgaccagttgcacgagtctcaacgcgacaaaatgccagcacttccggctaaaggtaacttgaacctccgtgacatcttaaaatcggacttcgcgttcgcg

SEQ ID NO: 1934 - protein, 890 aa, synthetic construct
  REGION 1..890: note = Variant of RNA polymerase
MHHHHHHMNTINIAKNDFSDIELAAIPFNTLADHYGERLAREQLALEHESYEMGEARFRKMFERQLKAGEVADNAAAKPLITTLLPKMIARINDWFEEVKAKRGKRPTAFQFLQEIKPEAVAYITIKTTLACLTSADNTTVQAVASAIGKAIEDEARFGRIRDLEAKHFKKNVEEQLNKRVGHVYKKAFMQVVEHDMLSKGLLGGVVWSSWHKEDSIHVGVRCIEMLIESTGMVSLHRQNAGVVGQDSERIELAPEYAEAIATRAGALAGISPMFQPCVVPPKPWTGILGGGYWAAGRKPLQLVRTRSLAALRRYEEVSMPEVIKAVNIAQNTAWRINKKVLDVANTITQWKHCPVADIPAMDRGEMPARPLDIDTNEIALKAWKKEASAFYRKDKARVSRRLSMEFMLSQANKFANYEAIWFPWNMDWRGRVYAVPMFNPQGNDMTKGLLTFAQEKPIGEDGFYWLKIHGANTAGVDKVPFPQRIKFVEDNHTNIMECAKAPLENTWWAEQDSPFCFLAFCFEYAGVINSGLSYNCSLPLAFDGSCSGLQHFSAMLRDEIGGKAVNLLPSAEYQDIYRIVSDKVNEMLKQDLINGTSTTVETVTDKKTGEITQRTKYGTKVMAQWWLEHGVNRGVTKRSVMTLVYGALEFGFRDQVLSDTIQKAIDNGKGDMFLNPNQAAGYMAKLIWNAVSGTVVAAVEAMNWLKSAAKLLAAEVKDRKTDTVLRGRCAVHWVTPDGFPVWQEYKKPIQTRLNLMFLGQFRLQPTINTNKDSEIDARKQVSGIAPNFVHSLDGNHLRMTVVWAHEKYGIESFALIHDSFGTIPADAANLFKAVRETFVDTYESCDVLADFYDQIADQLHESQRDKMPALPAKGNLNLRDILKSDFAFA

SEQ ID NO: 1935 - DNA, 2670 bp, synthetic construct
  misc_feature 1..2670: note = Variant of RNA polymerase
  source 1..2670: mol_type = other DNA
atgcaccatcaccatcaccatatgaacacgattaacattgctaagaacgacttctctgacatcgaactggctgctatcccgttcaacactctggctgaccattacggtgagcgtttagctcgcgaacagttggcccttgagcatgagtcttacgagatgggtgaagcacgcttccgcaagatgtttgagcgtcaacttaaagctggtgaggttgcggataacgctgccgccaagcctctcatcactaccctactccctaagatgattgcacgcatcaacgactggtttgaggaagtgaaagccaagcgcggcaagcgcccgacagccttccagttcctgcaagaaatcaagccggaagccgtagcgtacatcaccattaagaccactctggcttgcctaaccagtgcggacaatacaaccgttcaggctgtagcaagcgcaatcggtaaagccattgaggacgaggctcgcttcggtcgtatccgtgaccttgaagctaagcacttcaagaagaacgttgaggaacaactcaacaagcgcgtagggcacgtctacaagaaagcatttatgcaagttgtcgagcacgacatgctctctaagggtctactcgggggcgtggtatggtcgtcgtggcataaggaagactctattcatgtaggagtacgctgcatcgagatgctcattgagtcaaccggaatggttagcttacaccgccaaaatgctggcgtagtaggtcaagactctgagcgtatcgaactcgcacctgaatacgctgaggctatcgcaacccgtgcaggtgcgctggctggcatctctccgatgttccaaccttgcgtagttcctcctaagccgtggactggcattactggtggtggctattgggctgcggggcgcaaacccctgcagttagtacgtactcgcagtctggcggcgcttcgccgctatgaagaagtgtcgatgccggaggtcatcaaagcagtcaacattgcgcagaatacagcatggcgtattaacaagaaagttctcgacgtagcgaataccatcacccaatggaaacactgtccagtcgcagatatccctgcgatggatcgtggcgaaatgccagctcgtccgttggacatcgataccaacgagattgcacttaaagcgtggaagaaagaaatgtccgcgttctaccgcaaagacaaagcacgcgttagccgtcgtctgtcaatggagtttatgttatctcaggcgaacaagtttgcgaattatgaggcaatctggtttccgtggaacatggattggcgtgggcgcgtgtacgctgtcccgatgttcaatcctcagggcaacgatatgacgaaaggcctgctgacctttgcgcaggagaaacccattggtgaagacggcttctattggctcaagattcatggcgcaaatacagctggagtggataaagtaccgtttccacaacgcatcaaatttgttgaggataaccatacgaatattatggaatgcgcgaaagcaccgctggaaaacacttggtgggcggaacaggactcgccgttctgctttctggcgttctgctttgagtatgctggcgtcatcaatagtggtctgtcgtacaactgtagcttgcctctggcattcgatggtagttgctccggcctgcaacatttctcagcgatgttacgcgacgaaattggcggcaaagctgtgaatctcctcccatctgcggaataccaggatatttatcgtatcgtcagcgacaaagttaacgagatgctgaaacaagatctgattaacggtacctctaccaccgtggaaacggtgactgataagaagacaggcgaaattacccaacgcacgaaatacgggaccaaagttatggcacagtggtggttagaacacggtgtgaatcgtggcgtcacgaaacgctcggttatgactttggtgtatggggcgctggagtttggattccgcgatcaagtgctgagtgacaccattcaaaaagcgatcgataacggcaagggtgacatgtttctgaatccgaatcaggctgctggttacatggcgaaactgatctggaacgcagtgtccgggaccgtagtcgcagcagttgaggcgatgaactggctgaaaagtgcggcgaaattacttgctgctgaagtgaaggatcgtaagacggatacagttctgcgtggccgctgcgcagtacattgggtgactcccgacggcttccctgtgtggcaggaatacaagaagcctattcagacgcgcttgaacctgatgttcctcggtcagttccgcttacagcctaccattaacaccaacaaagatagcgagattgatgcgcgcaaacaggtgtctggtatcgctcctaactttgtacacagcctggacggtaaccaccttcgtatgactgtagtgtgggcacacgagaagtacggaatcgaatcttttgcactgattcacgactccttcggtaccattccggctgacgctgcgaacctgttcaaagcagtgcgcgaaactttcgttgacacatatgagtcttgtgatgtactggctgatttctacgaccagattgctgaccagttgcacgagtctcaacgcgacaaaatgccagcacttccggctaaaggtaacttgaacctccgtgacatcttaaaatcggacttcgcgttcgcg

SEQ ID NO: 1936 - protein, 890 aa, synthetic construct
  REGION 1..890: note = Variant of RNA polymerase
MHHHHHHMNTINIAKNDFSDIELAAIPFNTLADHYGERLAREQLALEHESYEMGEARFRKMFERQLKAGEVADNAAAKPLITTLLPKMIARINDWFEEVKAKRGKRPTAFQFLQEIKPEAVAYITIKTTLACLTSADNTTVQAVASAIGKAIEDEARFGRIRDLEAKHFKKNVEEQLNKRVGHVYKKAFMQVVEHDMLSKGLLGGVVWSSWHKEDSIHVGVRCIEMLIESTGMVSLHRQNAGVVGQDSERIELAPEYAEAIATRAGALAGISPMFQPCVVPPKPWTGITGGGYWAAGRKPLQLVRTRSLAALRRYEEVSMPEVIKAVNIAQNTAWRINKKVLDVANTITQWKHCPVADIPAMDRGEMPARPLDIDTNEIALKAWKKEMSAFYRKDKARVSRRLSMEFMLSQANKFANYEAIWFPWNMDWRGRVYAVPMFNPQGNDMTKGLLTFAQEKPIGEDGFYWLKIHGANTAGVDKVPFPQRIKFVEDNHTNIMECAKAPLENTWWAEQDSPFCFLAFCFEYAGVINSGLSYNCSLPLAFDGSCSGLQHFSAMLRDEIGGKAVNLLPSAEYQDIYRIVSDKVNEMLKQDLINGTSTTVETVTDKKTGEITQRTKYGTKVMAQWWLEHGVNRGVTKRSVMTLVYGALEFGFRDQVLSDTIQKAIDNGKGDMFLNPNQAAGYMAKLIWNAVSGTVVAAVEAMNWLKSAAKLLAAEVKDRKTDTVLRGRCAVHWVTPDGFPVWQEYKKPIQTRLNLMFLGQFRLQPTINTNKDSEIDARKQVSGIAPNFVHSLDGNHLRMTVVWAHEKYGIESFALIHDSFGTIPADAANLFKAVRETFVDTYESCDVLADFYDQIADQLHESQRDKMPALPAKGNLNLRDILKSDFAFA

SEQ ID NO: 1937 - DNA, 2670 bp, synthetic construct
  misc_feature 1..2670: note = Variant of RNA polymerase
  source 1..2670: mol_type = other DNA
atgcaccatcaccatcaccatatgaacacgattaacattgctaagaacgacttctctgacatcgaactggctgctatcccgttcaacactctggctgaccattacggtgagcgtttagctcgcgaacagttggcccttgagcatgagtcttacgagatgggtgaagcacgcttccgcaagatgtttgagcgtcaacttaaagctggtgaggttgcggataacgctgccgccaagcctctcatcactaccctactccctaagatgattgcacgcatcaacgactggtttgaggaagtgaaagccaagcgcggcaagcgcccgacagccttccagttcctgcaagaaatcaagccggaagccgtagcgtacatcaccattaagaccactctggcttgcctaaccagtgcggacaatacaaccgttcaggctgtagcaagcgcaatcggtaaagccattgaggacgaggctcgcttcggtcgtatccgtgaccttgaagctaagcacttcaagaagaacgttgaggaacaactcaacaagcgcgtagggcacgtctacaagaaagcatttatgcaagttgtcgagcacgacatgctctctaagggtctactcgggggcgtggtatggtcgtcgtggcataaggaagactctattcatgtaggagtacgctgcatcgagatgctcattgagtcaaccggaatggttagcttacaccgccaaaatgctggcgtagtaggtcaagactctgagcgtatcgaactcgcacctgaatacgctgaggctatcgcaacccgtgcaggtgcgctggctggcatctctccgatgttccaaccttgcgtagttcctcctaagccgtggactggcattactggtggtggctattgggctgcggggcgcaaacccctgcagttagtacgtactcgcagtctggcggcgcttcgccgctatgaagaagtgtcgatgccggaggtcatcaaagcagtcaacattgcgcagaatacagcatggcgtattaacaagaaagttctcgacgtagcgaataccatcacccaatggaaacactgtccagtcgcagatatccctgcgatggatcgtggcgaaatgccagctcgtccgttggacatcgataccaacgagattgcacttaaagcgtggaagaaagaagcttccgcgttctaccgcaaagacaaagcacgcgttagccgtcgtctgtcaatggagtttatgttatctcaggcgaacaagtttgcgaattatgaggcaatctggtttccgtggaacatggattggcgtgggcgcgtgtacgctgtcccgatgttcaatcctcagggcaacgatatgacgaaaggcctgctgacctttgcgcaggagaaacccattggtgaagacggcttctattggctcaagattcatggcgcaaatacagctggagtggataaagtaccgtttccacaacgcatcaaatttgttgaggataaccatacgaatattatggaatgcgcgaaagcaccgctggaaaacacttggtgggcggaacaggaccgtccgttctgctttctggcgttctgctttgagtatgctggcgtcatcaatagtggtctgtcgtacaactgtagcttgcctctggcattcgatggtagttgctccggcctgcaacatttctcagcgatgttacgcgacgaaattggcggcaaagctgtgaatctcctcccatctgcggaataccaggatatttatcgtatcgtcagcgacaaagttaacgagatgctgaaacaagatctgattaacggtacctctaccaccgtggaaacggtgactgataagaagacaggcgaaattacccaacgcacgaaatacgggaccaaagttatggcacagtggtggttagaacacggtgtgaatcgtggcgtcacgaaacgctcggttatgactttggtgtatggggcgctggagtttggattccgcgatcaagtgctgagtgacaccattcaaaaagcgatcgataacggcaagggtgacatgtttctgaatccgaatcaggctgctggttacatggcgaaactgatctggaacgcagtgtccgggaccgtagtcgcagcagttgaggcgatgaactggctgaaaagtgcggcgaaattacttgctgctgaagtgaaggatcgtaagacggatacagttctgcgtggccgctgcgcagtacattgggtgactcccgacggcttccctgtgtggcaggaatacaagaagcctattcagacgcgcttgaacctgatgttcctcggtcagttccgcttacagcctaccattaacaccaacaaagatagcgagattgatgcgcgcaaacaggtgtctggtatcgctcctaactttgtacacagcctggacggtaaccaccttcgtatgactgtagtgtgggcacacgagaagtacggaatcgaatcttttgcactgattcacgactccttcggtaccattccggctgacgctgcgaacctgttcaaagcagtgcgcgaaactttcgttgacacatatgagtcttgtgatgtactggctgatttctacgaccagattgctgaccagttgcacgagtctcaacgcgacaaaatgccagcacttccggctaaaggtaacttgaacctccgtgacatcttaaaatcggacttcgcgttcgcg

SEQ ID NO: 1938 - protein, 890 aa, synthetic construct
  REGION 1..890: note = Variant of RNA polymerase
MHHHHHHMNTINIAKNDFSDIELAAIPFNTLADHYGERLAREQLALEHESYEMGEARFRKMFERQLKAGEVADNAAAKPLITTLLPKMIARINDWFEEVKAKRGKRPTAFQFLQEIKPEAVAYITIKTTLACLTSADNTTVQAVASAIGKAIEDEARFGRIRDLEAKHFKKNVEEQLNKRVGHVYKKAFMQVVEHDMLSKGLLGGVVWSSWHKEDSIHVGVRCIEMLIESTGMVSLHRQNAGVVGQDSERIELAPEYAEAIATRAGALAGISPMFQPCVVPPKPWTGITGGGYWAAGRKPLQLVRTRSLAALRRYEEVSMPEVIKAVNIAQNTAWRINKKVLDVANTITQWKHCPVADIPAMDRGEMPARPLDIDTNEIALKAWKKEASAFYRKDKARVSRRLSMEFMLSQANKFANYEAIWFPWNMDWRGRVYAVPMFNPQGNDMTKGLLTFAQEKPIGEDGFYWLKIHGANTAGVDKVPFPQRIKFVEDNHTNIMECAKAPLENTWWAEQDRPFCFLAFCFEYAGVINSGLSYNCSLPLAFDGSCSGLQHFSAMLRDEIGGKAVNLLPSAEYQDIYRIVSDKVNEMLKQDLINGTSTTVETVTDKKTGEITQRTKYGTKVMAQWWLEHGVNRGVTKRSVMTLVYGALEFGFRDQVLSDTIQKAIDNGKGDMFLNPNQAAGYMAKLIWNAVSGTVVAAVEAMNWLKSAAKLLAAEVKDRKTDTVLRGRCAVHWVTPDGFPVWQEYKKPIQTRLNLMFLGQFRLQPTINTNKDSEIDARKQVSGIAPNFVHSLDGNHLRMTVVWAHEKYGIESFALIHDSFGTIPADAANLFKAVRETFVDTYESCDVLADFYDQIADQLHESQRDKMPALPAKGNLNLRDILKSDFAFA

SEQ ID NO: 1939 - DNA, 2670 bp, synthetic construct
  misc_feature 1..2670: note = Variant of RNA polymerase
  source 1..2670: mol_type = other DNA
atgcaccatcaccatcaccatatgaacacgattaacattgctaagaacgacttctctgacatcgaactggctgctatcccgttcaacactctggctgaccattacggtgagcgtttagctcgcgaacagttggcccttgagcatgagtcttacgagatgggtgaagcacgcttccgcaagatgtttgagcgtcaacttaaagctggtgaggttgcggataacgctgccgccaagcctctcatcactaccctactccctaagatgattgcacgcatcaacgactggtttgaggaagtgaaagccaagcgcggcaagcgcccgacagccttccagttcctgcaagaaatcaagccggaagccgtagcgtacatcaccattaagaccactctggcttgcctaaccagtgcggacaatacaaccgttcaggctgtagcaagcgcaatcggtaaagccattgaggacgaggctcgcttcggtcgtatccgtgaccttgaagctaagcacttcaagaagaacgttgaggaacaactcaacaagcgcgtagggcacgtctacaagaaagcatttatgcaagttgtcgagcacgacatgctctctaagggtctactcgggggcgtggtatggtcgtcgtggcataaggaagactctattcatgtaggagtacgctgcatcgagatgctcattgagtcaaccggaatggttagcttacaccgccaaaatgctggcgtagtaggtcaagactctgagcgtatcgaactcgcacctgaatacgctgaggctatcgcaacccgtgcaggtgcgctggctggcatctctccgatgttccaaccttgcgtagttcctcctaagccgtggactggcattactggtggtggctattgggctgcggggcgcaaacccctgcagttagtacgtactcgcagtctggcggcgcttcgccgctatgaagaagtgtcgatgccggaggtcatcaaagcagtcaacattgcgcagaatacagcatggcgtattaacaagaaagttctcgacgtagcgaataccatcacccaatggaaacactgtccagtcgcagatatccctgcgatggatcgtggcgaaatgccagctcgtccgttggacatcgataccaacgagattgcacttaaagcgtggaagaaagaagcttccgcgttctaccgcaaagacaaagcacgcgttagccgtcgtctgtcaatggagtttatgttatctcaggcgaacaagtttgcgaattatgaggcaatctggtttccgtggaacatggattggcgtgggcgcgtgtacgctgtcccgatgttcaatcctcagggcaacgatatgacgaaaggcctgctgacctttgcgcaggagaaacccattggtgaagacggcttctattggctcaagattcatggcgcaaatttggctggagtggataaagtaccgtttccacaacgcatcaaatttgttgaggataaccatacgaatattatggaatgcgcgaaagcaccgctggaaaacacttggtgggcggaacaggactcgccgttctgctttctggcgttctgctttgagtatgctggcgtcatcaatagtggtctgtcgtacaactgtagcttgcctctggcattcgatggtagttgctccggcctgcaacatttctcagcgatgttacgcgacgaaattggcggcaaagctgtgaatctcctcccatctgcggaataccaggatatttatcgtatcgtcagcgacaaagttaacgagatgctgaaacaagatctgattaacggtacctctaccaccgtggaaacggtgactgataagaagacaggcgaaattacccaacgcacgaaatacgggaccaaagttatggcacagtggtggttagaacacggtgtgaatcgtggcgtcacgaaacgctcggttatgactttggtgtatggggcgctggagtttggattccgcgatcaagtgctgagtgacaccattcaaaaagcgatcgataacggcaagggtgacatgtttctgaatccgaatcaggctgctggttacatggcgaaactgatctggaacgcagtgtccgggaccgtagtcgcagcagttgaggcgatgaactggctgaaaagtgcggcgaaattacttgctgctgaagtgaaggatcgtaagacggatacagttctgcgtggccgctgcgcagtacattgggtgactcccgacggcttccctgtgtggcaggaatacaagaagcctattcagacgcgcttgaacctgatgttcctcggtcagttccgcttacagcctaccattaacaccaacaaagatagcgagattgatgcgcgcaaacaggtgtctggtatcgctcctaactttgtacacagcctggacggtaaccaccttcgtatgactgtagtgtgggcacacgagaagtacggaatcgaatcttttgcactgattcacgactccttcggtaccattccggctgacgctgcgaacctgttcaaagcagtgcgcgaaactttcgttgacacatatgagtcttgtgatgtactggctgatttctacgaccagattgctgaccagttgcacgagtctcaacgcgacaaaatgccagcacttccggctaaaggtaacttgaacctccgtgacatcttaaaatcggacttcgcgttcgcg

SEQ ID NO: 1940 - protein, 890 aa, synthetic construct
  REGION 1..890: note = Variant of RNA polymerase
MHHHHHHMNTINIAKNDFSDIELAAIPFNTLADHYGERLAREQLALEHESYEMGEARFRKMFERQLKAGEVADNAAAKPLITTLLPKMIARINDWFEEVKAKRGKRPTAFQFLQEIKPEAVAYITIKTTLACLTSADNTTVQAVASAIGKAIEDEARFGRIRDLEAKHFKKNVEEQLNKRVGHVYKKAFMQVVEHDMLSKGLLGGVVWSSWHKEDSIHVGVRCIEMLIESTGMVSLHRQNAGVVGQDSERIELAPEYAEAIATRAGALAGISPMFQPCVVPPKPWTGITGGGYWAAGRKPLQLVRTRSLAALRRYEEVSMPEVIKAVNIAQNTAWRINKKVLDVANTITQWKHCPVADIPAMDRGEMPARPLDIDTNEIALKAWKKEASAFYRKDKARVSRRLSMEFMLSQANKFANYEAIWFPWNMDWRGRVYAVPMFNPQGNDMTKGLLTFAQEKPIGEDGFYWLKIHGANLAGVDKVPFPQRIKFVEDNHTNIMECAKAPLENTWWAEQDSPFCFLAFCFEYAGVINSGLSYNCSLPLAFDGSCSGLQHFSAMLRDEIGGKAVNLLPSAEYQDIYRIVSDKVNEMLKQDLINGTSTTVETVTDKKTGEITQRTKYGTKVMAQWWLEHGVNRGVTKRSVMTLVYGALEFGFRDQVLSDTIQKAIDNGKGDMFLNPNQAAGYMAKLIWNAVSGTVVAAVEAMNWLKSAAKLLAAEVKDRKTDTVLRGRCAVHWVTPDGFPVWQEYKKPIQTRLNLMFLGQFRLQPTINTNKDSEIDARKQVSGIAPNFVHSLDGNHLRMTVVWAHEKYGIESFALIHDSFGTIPADAANLFKAVRETFVDTYESCDVLADFYDQIADQLHESQRDKMPALPAKGNLNLRDILKSDFAFA

SEQ ID NO: 1941 - DNA, 2670 bp, synthetic construct
  misc_feature 1..2670: note = Variant of RNA polymerase
  source 1..2670: mol_type = other DNA
atgcaccatcaccatcaccatatgaacacgattaacattgctaagaacgacttctctgacatcgaactggctgctatcccgttcaacactctggctgaccattacggtgagcgtttagctcgcgaacagttggcccttgagcatgagtcttacgagatgggtgaagcacgcttccgcaagatgtttgagcgtcaacttaaagctggtgaggttgcggataacgctgccgccaagcctctcatcactaccctactccctaagatgattgcacgcatcaacgactggtttgaggaagtgaaagccaagcgcggcaagcgcccgacagccttccagttcctgcaagaaatcaagccggaagccgtagcgtacatcaccattaagaccactctggcttgcctaaccagtgcggacaatacaaccgttcaggctgtagcaagcgcaatcggtaaagccattgaggacgaggctcgcttcggtcgtatccgtgaccttgaagctaagcacttcaagaagaacgttgaggaacaactcaacaagcgcgtagggcacgtctacaagaaagcatttatgcaagttgtcgagcacgacatgctctctaagggtctactcgggggcgtggtatggtcgtcgtggcataaggaagactctattcatgtaggagtacgctgcatcgagatgctcattgagtcaaccggaatggttagcttacaccgccaaaatgctggcgtagtaggtcaagactctgagcgtatcgaactcgcacctgaatacgctgaggctatcgcaacccgtgcaggtgcgctggctggcatctctccgatgttccaaccttgcgtagttcctcctaagccgtggactggcattactggtggtggctattgggctgcggggcgcaaacccctgcagttagtacgtactcgcagtctggcggcgcttcgccgctatgaagaagtgtcgatgccggaggtcatcaaagcagtcaacattgcgcagaatacagcatggcgtattaacaagaaagttctcgacgtagcgaataccatcacccaatggaaacactgtccagtcgcagatatccctgcgatggatcgtggcgaaatgccagctcgtccgttggacatcgataccaacgagattgcacttaaagcgtggaagaaagaagcttccgcgttctaccgcaaagacaaagcacgcgttagccgtcgtctgtcaatgtcgtttatgttatctcaggcgaacaagtttgcgaattatgaggcaatctggtttccgtggaacatggattggcgtgggcgcgtgtacgctgtcccgatgttcaatcctcagggcaacgatatgacgaaaggcctgctgacctttgcgcaggagaaacccattggtgaagacggcttctattggctcaagattcatggcgcaaatacagctggagtggataaagtaccgtttccacaacgcatcaaatttgttgaggataaccatacgaatattatggaatgcgcgaaagcaccgctggaaaacacttggtgggcggaacaggactcgccgttctgctttctggcgttctgctttgagtatgctggcgtcatcaatagtggtctgtcgtacaactgtagcttgcctctggcattcgatggtagttgctccggcctgcaacatttctcagcgatgttacgcgacgaaattggcggcaaagctgtgaatctcctcccatctgcggaataccaggatatttatcgtatcgtcagcgacaaagttaacgagatgctgaaacaagatctgattaacggtacctctaccaccgtggaaacggtgactgataagaagacaggcgaaattacccaacgcacgaaatacgggaccaaagttatggcacagtggtggttagaacacggtgtgaatcgtggcgtcacgaaacgctcggttatgactttggtgtatggggcgctggagtttggattccgcgatcaagtgctgagtgacaccattcaaaaagcgatcgataacggcaagggtgacatgtttctgaatccgaatcaggctgctggttacatggcgaaactgatctggaacgcagtgtccgggaccgtagtcgcagcagttgaggcgatgaactggctgaaaagtgcggcgaaattacttgctgctgaagtgaaggatcgtaagacggatacagttctgcgtggccgctgcgcagtacattgggtgactcccgacggcttccctgtgtggcaggaatacaagaagcctattcagacgcgcttgaacctgatgttcctcggtcagttccgcttacagcctaccattaacaccaacaaagatagcgagattgatgcgcgcaaacaggtgtctggtatcgctcctaactttgtacacagcctggacggtaaccaccttcgtatgactgtagtgtgggcacacgagaagtacggaatcgaatcttttgcactgattcacgactccttcggtaccattccggctgacgctgcgaacctgttcaaagcagtgcgcgaaactttcgttgacacatatgagtcttgtgatgtactggctgatttctacgaccagattgctgaccagttgcacgagtctcaacgcgacaaaatgccagcacttccggctaaaggtaacttgaacctccgtgacatcttaaaatcggacttcgcgttcgcg

SEQ ID NO: 1942 - protein, 890 aa, synthetic construct
  REGION 1..890: note = Variant of RNA polymerase
MHHHHHHMNTINIAKNDFSDIELAAIPFNTLADHYGERLAREQLALEHESYEMGEARFRKMFERQLKAGEVADNAAAKPLITTLLPKMIARINDWFEEVKAKRGKRPTAFQFLQEIKPEAVAYITIKTTLACLTSADNTTVQAVASAIGKAIEDEARFGRIRDLEAKHFKKNVEEQLNKRVGHVYKKAFMQVVEHDMLSKGLLGGVVWSSWHKEDSIHVGVRCIEMLIESTGMVSLHRQNAGVVGQDSERIELAPEYAEAIATRAGALAGISPMFQPCVVPPKPWTGITGGGYWAAGRKPLQLVRTRSLAALRRYEEVSMPEVIKAVNIAQNTAWRINKKVLDVANTITQWKHCPVADIPAMDRGEMPARPLDIDTNEIALKAWKKEASAFYRKDKARVSRRLSMSFMLSQANKFANYEAIWFPWNMDWRGRVYAVPMFNPQGNDMTKGLLTFAQEKPIGEDGFYWLKIHGANTAGVDKVPFPQRIKFVEDNHTNIMECAKAPLENTWWAEQDSPFCFLAFCFEYAGVINSGLSYNCSLPLAFDGSCSGLQHFSAMLRDEIGGKAVNLLPSAEYQDIYRIVSDKVNEMLKQDLINGTSTTVETVTDKKTGEITQRTKYGTKVMAQWWLEHGVNRGVTKRSVMTLVYGALEFGFRDQVLSDTIQKAIDNGKGDMFLNPNQAAGYMAKLIWNAVSGTVVAAVEAMNWLKSAAKLLAAEVKDRKTDTVLRGRCAVHWVTPDGFPVWQEYKKPIQTRLNLMFLGQFRLQPTINTNKDSEIDARKQVSGIAPNFVHSLDGNHLRMTVVWAHEKYGIESFALIHDSFGTIPADAANLFKAVRETFVDTYESCDVLADFYDQIADQLHESQRDKMPALPAKGNLNLRDILKSDFAFA

SEQ ID NO: 1943 - DNA, 2670 bp, synthetic construct
  misc_feature 1..2670: note = Variant of RNA polymerase
  source 1..2670: mol_type = other DNA
atgcaccatcaccatcaccatatgaacacgattaacattgctaagaacgacttctctgacatcgaactggctgctatcccgttcaacactctggctgaccattacggtgagcgtttagctcgcgaacagttggcccttgagcatgagtcttacgagatgggtgaagcacgcttccgcaagatgtttgagcgtcaacttaaagctggtgaggttgcggataacgctgccgccaagcctctcatcactaccctactccctaagatgattgcacgcatcaacgactggtttgaggaagtgaaagccaagcgcggcaagcgcccgacagccttccagttcctgcaagaaatcaagccggaagccgtagcgtacatcaccattaagaccactctggcttgcctaaccagtgcggacaatacaaccgttcaggctgtagcaagcgcaatcggtaaagccattgaggacgaggctcgcttcggtcgtatccgtgaccttgaagctaagcacttcaagaagaacgttgaggaacaactcaacaagcgcgtagggcacgtctacaagaaagcatttatgcaagttgtcgagcacgacatgctctctaagggtctactcgggggcgtggtatggtcgtcgtggcataaggaagactctattcatgtaggagtacgctgcatcgagatgctcattgagtcaaccggaatggttagcttacaccgccaaaatgctggcgtagtaggtcaagactctgagcgtatcgaactcgcacctgaatacgctgaggctatcgcaacccgtgcaggtgcgctggctggcatctctccgatgttccaaccttgcgtagttcctcctaagccgtggactggcattactggtggtggctattgggctgcggggcgcaaacccctgcagttagtacgtactcgcagtctggcggcgcttcgccgctatgaagaagtgtcgatgccggaggtcatcaaagcagtcaacattgcgcagaatacagcatggcgtattaacaagaaagttctcgacgtagcgaataccatcacccaatggaaacactgtccagtccgtgatatccctgcgatggatcgtggcgaaatgccagctcgtccgttggacatcgataccaacgagattgcacttaaagcgtggaagaaagaagcttccgcgttctaccgcaaagacaaagcacgcgttagccgtcgtctgtcaatggagtttatgttatctcaggcgaacaagtttgcgaattatgaggcaatctggtttccgtggaacatggattggcgtgggcgcgtgtacgctgtcccgatgttcaatcctcagggcaacgatatgacgaaaggcctgctgacctttgcgcaggagaaacccattggtgaagacggcttctattggctcaagattcatggcgcaaatacagctggagtggataaagtaccgtttccacaacgcatcaaatttgttgaggataaccatacgaatattatggaatgcgcgaaagcaccgctggaaaacacttggtgggcggaacaggactcgccgttctgctttctggcgttctgctttgagtatgctggcgtcatcaatagtggtctgtcgtacaactgtagcttgcctctggcattcgatggtagttgctccggcctgcaacatttctcagcgatgttacgcgacgaaattggcggcaaagctgtgaatctcctcccatctgcggaataccaggatatttatcgtatcgtcagcgacaaagttaacgagatgctgaaacaagatctgattaacggtacctctaccaccgtggaaacggtgactgataagaagacaggcgaaattacccaacgcacgaaatacgggaccaaagttatggcacagtggtggttagaacacggtgtgaatcgtggcgtcacgaaacgctcggttatgactttggtgtatggggcgctggagtttggattccgcgatcaagtgctgagtgacaccattcaaaaagcgatcgataacggcaagggtgacatgtttctgaatccgaatcaggctgctggttacatggcgaaactgatctggaacgcagtgtccgggaccgtagtcgcagcagttgaggcgatgaactggctgaaaagtgcggcgaaattacttgctgctgaagtgaaggatcgtaagacggatacagttctgcgtggccgctgcgcagtacattgggtgactcccgacggcttccctgtgtggcaggaatacaagaagcctattcagacgcgcttgaacctgatgttcctcggtcagttccgcttacagcctaccattaacaccaacaaagatagcgagattgatgcgcgcaaacaggtgtctggtatcgctcctaactttgtacacagcctggacggtaaccaccttcgtatgactgtagtgtgggcacacgagaagtacggaatcgaatcttttgcactgattcacgactccttcggtaccattccggctgacgctgcgaacctgttcaaagcagtgcgcgaaactttcgttgacacatatgagtcttgtgatgtactggctgatttctacgaccagattgctgaccagttgcacgagtctcaacgcgacaaaatgccagcacttccggctaaaggtaacttgaacctccgtgacatcttaaaatcggacttcgcgttcgcg

SEQ ID NO: 1944 - protein, 890 aa, synthetic construct
  REGION 1..890: note = Variant of RNA polymerase
MHHHHHHMNTINIAKNDFSDIELAAIPFNTLADHYGERLAREQLALEHESYEMGEARFRKMFERQLKAGEVADNAAAKPLITTLLPKMIARINDWFEEVKAKRGKRPTAFQFLQEIKPEAVAYITIKTTLACLTSADNTTVQAVASAIGKAIEDEARFGRIRDLEAKHFKKNVEEQLNKRVGHVYKKAFMQVVEHDMLSKGLLGGVVWSSWHKEDSIHVGVRCIEMLIESTGMVSLHRQNAGVVGQDSERIELAPEYAEAIATRAGALAGISPMFQPCVVPPKPWTGITGGGYWAAGRKPLQLVRTRSLAALRRYEEVSMPEVIKAVNIAQNTAWRINKKVLDVANTITQWKHCPVRDIPAMDRGEMPARPLDIDTNEIALKAWKKEASAFYRKDKARVSRRLSMEFMLSQANKFANYEAIWFPWNMDWRGRVYAVPMFNPQGNDMTKGLLTFAQEKPIGEDGFYWLKIHGANTAGVDKVPFPQRIKFVEDNHTNIMECAKAPLENTWWAEQDSPFCFLAFCFEYAGVINSGLSYNCSLPLAFDGSCSGLQHFSAMLRDEIGGKAVNLLPSAEYQDIYRIVSDKVNEMLKQDLINGTSTTVETVTDKKTGEITQRTKYGTKVMAQWWLEHGVNRGVTKRSVMTLVYGALEFGFRDQVLSDTIQKAIDNGKGDMFLNPNQAAGYMAKLIWNAVSGTVVAAVEAMNWLKSAAKLLAAEVKDRKTDTVLRGRCAVHWVTPDGFPVWQEYKKPIQTRLNLMFLGQFRLQPTINTNKDSEIDARKQVSGIAPNFVHSLDGNHLRMTVVWAHEKYGIESFALIHDSFGTIPADAANLFKAVRETFVDTYESCDVLADFYDQIADQLHESQRDKMPALPAKGNLNLRDILKSDFAFA

SEQ ID NO: 1945 - DNA, 2670 bp, synthetic construct
  misc_feature 1..2670: note = Variant of RNA polymerase
  source 1..2670: mol_type = other DNA
atgcaccatcaccatcaccatatgaacacgattaacattgctaagaacgacttctctgacatcgaactggctgctatcccgttcaacactctggctgaccattacggtgagcgtttagctcgcgaacagttggcccttgagcatgagtcttacgagatgggtgaagcacgcttccgcaagatgtttgagcgtcaacttaaagctggtgaggttgcggataacgctgccgccaagcctctcatcactaccctactccctaagatgattgcacgcatcaacgactggtttgaggaagtgaaagccaagcgcggcaagcgcccgacagccttccagttcctgcaagaaatcaagccggaagccgtagcgtacatcaccattaagaccactctggcttgcctaaccagtgcggacaatacaaccgttcaggctgtagcaagcgcaatcggtaaagccattgaggacgaggctcgcttcggtcgtatccgtgaccttgaagctaagcacttcaataagaacgttgaggaacaactcaacaagcgcgtagggcacgtctacaagaaagcatttatgcaagttgtcgagcacgacatgctctctaagggtctactcgggggcgtggtatggtcgtcgtggcataaggaagactctattcatgtaggagtacgctgcatcgagatgctcattgagtcaaccggaatggttagcttacaccgccaaaatgctggcgtagtaggtcaagactctgagcgtatcgaactcgcacctgaatacgctgaggctatcgcaacccgtgcaggtgcgctggctggcatctctccgatgttccaaccttgcgtagttcctcctaagccgtggactggcattactggtggtggctattgggctgcggggcgcaaacccctgcagttagtacgtactcgcagtctggcggcgcttcgccgctatgaagaagtgtcgatgccggaggtcatcaaagcagtcaacattgcgcagaatacagcatggcgtattaacaagaaagttctcgacgtagcgaataccatcacccaatggaaacactgtccagtcgcagatatccctgcgatggatcgtggcgaaatgccagctcgtccgttggacatcgataccaacgagattgcacttaaagcgtggaagaaagaagcttccgcgttctaccgcaaagacaaagcacgcgttagccgtcgtctgtcaatggagtttatgttatctcaggcgaacaagtttgcgaattatgaggcaatctggtttccgtggaacatggattggcgtgggcgcgtgtacgctgtcccgatgttcaatcctcagggcaacgatatgacgaaaggcctgctgacctttgcgcaggagaaacccattggtgaagacggcttctattggctcaagattcatggcgcaaatatggctggagtggataaagtaccgtttccacaacgcatcaaatttgttgaggataaccatacgaatattatggaatgcgcgaaagcaccgctggaaaacacttggtgggcggaacaggactcgccgttctgctttctggcgttctgctttgagtatgctggcgtcatcaatagtggtctgtcgtacaactgtagcttgcctctggcattcgatggtagttgctccggcctgcaacatttctcagcgatgttacgcgacgaaattggcggcaaagctgtgaatctcctcccatctgcggaataccaggatatttatcgtatcgtcagcgacaaagttaacgagatgctgaaacaagatctgattaacggtacctctaccaccgtggaaacggtgactgataagaagacaggcgaaattacccaacgcacgaaatacgggaccaaagttatggcacagtggtggttagaacacggtgtgaatcgtggcgtcacgaaacgctcggttatgactttggtgtatggggcgctggagtttggattccgcgatcaagtgctgagtgacaccattcaaaaagcgatcgataacggcaagggtgacatgtttctgaatccgaatcaggctgctggttacatggcgaaactgatctggaacgcagtgtccgggaccgtagtcgcagcagttgaggcgatgaactggctgaaaagtgcggcgaaattacttgctgctgaagtgaaggatcgtaagacggatacagttctgcgtggccgctgcgcagtacattgggtgactcccgacggcttccctgtgtggcaggaatacaagaagcctattcagacgcgcttgaacctgatgttcctcggtcagttccgcttacagcctaccattaacaccaacaaagatagcgagattgatgcgcgcaaacaggtgtctggtatcgctcctaactttgtacacagcctggacggtaaccaccttcgtatgactgtagtgtgggcacacgagaagtacggaatcgaatcttttgcactgattcacgactccttcggtaccattccggctgacgctgcgaacctgttcaaagcagtgcgcgaaactttcgttgacacatatgagtcttgtgatgtactggctgatttctacgaccagattgctgaccagttgcacgagtctcaacgcgacaaaatgccagcacttccggctaaaggtaacttgaacctccgtgacatcttaaaatcggacttcgcgttcgcg

SEQ ID NO: 1946 - protein, 890 aa, synthetic construct
  REGION 1..890: note = Variant of RNA polymerase
MHHHHHHMNTINIAKNDFSDIELAAIPFNTLADHYGERLAREQLALEHESYEMGEARFRKMFERQLKAGEVADNAAAKPLITTLLPKMIARINDWFEEVKAKRGKRPTAFQFLQEIKPEAVAYITIKTTLACLTSADNTTVQAVASAIGKAIEDEARFGRIRDLEAKHFNKNVEEQLNKRVGHVYKKAFMQVVEHDMLSKGLLGGVVWSSWHKEDSIHVGVRCIEMLIESTGMVSLHRQNAGVVGQDSERIELAPEYAEAIATRAGALAGISPMFQPCVVPPKPWTGITGGGYWAAGRKPLQLVRTRSLAALRRYEEVSMPEVIKAVNIAQNTAWRINKKVLDVANTITQWKHCPVADIPAMDRGEMPARPLDIDTNEIALKAWKKEASAFYRKDKARVSRRLSMEFMLSQANKFANYEAIWFPWNMDWRGRVYAVPMFNPQGNDMTKGLLTFAQEKPIGEDGFYWLKIHGANMAGVDKVPFPQRIKFVEDNHTNIMECAKAPLENTWWAEQDSPFCFLAFCFEYAGVINSGLSYNCSLPLAFDGSCSGLQHFSAMLRDEIGGKAVNLLPSAEYQDIYRIVSDKVNEMLKQDLINGTSTTVETVTDKKTGEITQRTKYGTKVMAQWWLEHGVNRGVTKRSVMTLVYGALEFGFRDQVLSDTIQKAIDNGKGDMFLNPNQAAGYMAKLIWNAVSGTVVAAVEAMNWLKSAAKLLAAEVKDRKTDTVLRGRCAVHWVTPDGFPVWQEYKKPIQTRLNLMFLGQFRLQPTINTNKDSEIDARKQVSGIAPNFVHSLDGNHLRMTVVWAHEKYGIESFALIHDSFGTIPADAANLFKAVRETFVDTYESCDVLADFYDQIADQLHESQRDKMPALPAKGNLNLRDILKSDFAFA

SEQ ID NO: 1947 - DNA, 2670 bp, synthetic construct
  misc_feature 1..2670: note = Variant of RNA polymerase
  source 1..2670: mol_type = other DNA
atgcaccatcaccatcaccatatgaacacgattaacattgctaagaacgacttctctgacatcgaactggctgctatcccgttcaacactctggctgaccattacggtgagcgtttagctcgcgaacagttggcccttgagcatgagtcttacgagatgggtgaagcacgcttccgcaagatgtttgagcgtcaacttaaagctggtgaggttgcggataacgctgccgccaagcctctcatcactaccctactccctaagatgattgcacgcatcaacgactggtttgaggaagtgaaagccaagcgcggcaagcgcccgacagccttccagttcctgcaagaaatcaagccggaagccgtagcgtacatcaccattaagaccactctggcttgcctaaccagtgcggacaatacaaccgttcaggctgtagcaagcgcaatcggtaaagccattgaggacgaggctcgcttcggtcgtatccgtgaccttgaagctaagcacttcaagaagaacgttgaggaacaactcaacaagcgcgtagggcacgtctacaagaaagcatttatgcaagttgtcgagcacgacatgctctctaagggtctactcgggggcgtggtatggtcgtcgtggcataaggaagactctattcatgtaggagtacgctgcatcgagatgctcattgagtcaaccggaatggttagcttacaccgccaaaatgctggcgtagtaggtcaagactctgagcgtatcgaactcgcacctgaatacgctgaggctatcgcaacccgtgcaggtgcgctggctggcatctctccgatgttccaaccttgcgtagttcctcctaagccgtggactggcattactggtggtggctattgggctgcggggcgcaaacccctgcagttagtacgtactcgcagtctggcggcgcttcgccgctatgaagaagtgtcgatgccggaggtcatcaaagcagtcaacattgcgcagaatacagcatggcgtattaacaagaaagttctcgacgtagcgaataccatcacccaatggaaacactgtccagtcgcagatatccctgcgatggatcgtggcgaaatgccagctcgtccgttggacatcgataccaacgagattgcacttaaagcgtggaagaaagaagcttccgcgttctaccgcaaagacaaaattcgcgttagccgtcgtctgtcaatggagtttatgttatctcaggcgaacaagtttgcgaattatgaggcaatctggtttccgtggaacatggattggcgtgggcgcgtgtacgctgtcccgatgttcaatcctcagggcaacgatatgacgaaaggcctgctgacctttgcgcaggagaaacccattggtgaagacggcttctattggctcaagattcatggcgcaaatacagctggagtggataaagtaccgtttccacaacgcatcaaatttgttgaggataaccatacgaatattatggaatgcgcgaaagcaccgctggaaaacacttggtgggcggaacaggactcgccgttctgctttctggcgttctgctttgagtatgctggcgtcatcaatagtggtctgtcgtacaactgtagcttgcctctggcattcgatggtagttgctccggcctgcaacatttctcagcgatgttacgcgacgaaattggcggcaaagctgtgaatctcctcccatctgcggaataccaggatatttatcgtatcgtcagcgacaaagttaacgagatgctgaaacaagatctgattaacggtacctctaccaccgtggaaacggtgactgataagaagacaggcgaaattacccaacgcacgaaatacgggaccaaagttatggcacagtggtggttagaacacggtgtgaatcgtggcgtcacgaaacgctcggttatgactttggtgtatggggcgctggagtttggattccgcgatcaagtgctgagtgacaccattcaaaaagcgatcgataacggcaagggtgacatgtttctgaatccgaatcaggctgctggttacatggcgaaactgatctggaacgcagtgtccgggaccgtagtcgcagcagttgaggcgatgaactggctgaaaagtgcggcgaaattacttgctgctgaagtgaaggatcgtaagacggatacagttctgcgtggccgctgcgcagtacattgggtgactcccgacggcttccctgtgtggcaggaatacaagaagcctattcagacgcgcttgaacctgatgttcctcggtcagttccgcttacagcctaccattaacaccaacaaagatagcgagattgatgcgcgcaaacaggtgtctggtatcgctcctaactttgtacacagcctggacggtaaccaccttcgtatgactgtagtgtgggcacacgagaagtacggaatcgaatcttttgcactgattcacgactccttcggtaccattccggctgacgctgcgaacctgttcaaagcagtgcgcgaaactttcgttgacacatatgagtcttgtgatgtactggctgatttctacgaccagattgctgaccagttgcacgagtctcaacgcgacaaaatgccagcacttccggctaaaggtaacttgaacctccgtgacatcttaaaatcggacttcgcgttcgcg

SEQ ID NO: 1948 - protein, 890 aa, synthetic construct
  REGION 1..890: note = Variant of RNA polymerase
MHHHHHHMNTINIAKNDFSDIELAAIPFNTLADHYGERLAREQLALEHESYEMGEARFRKMFERQLKAGEVADNAAAKPLITTLLPKMIARINDWFEEVKAKRGKRPTAFQFLQEIKPEAVAYITIKTTLACLTSADNTTVQAVASAIGKAIEDEARFGRIRDLEAKHFKKNVEEQLNKRVGHVYKKAFMQVVEHDMLSKGLLGGVVWSSWHKEDSIHVGVRCIEMLIESTGMVSLHRQNAGVVGQDSERIELAPEYAEAIATRAGALAGISPMFQPCVVPPKPWTGITGGGYWAAGRKPLQLVRTRSLAALRRYEEVSMPEVIKAVNIAQNTAWRINKKVLDVANTITQWKHCPVADIPAMDRGEMPARPLDIDTNEIALKAWKKEASAFYRKDKIRVSRRLSMEFMLSQANKFANYEAIWFPWNMDWRGRVYAVPMFNPQGNDMTKGLLTFAQEKPIGEDGFYWLKIHGANTAGVDKVPFPQRIKFVEDNHTNIMECAKAPLENTWWAEQDSPFCFLAFCFEYAGVINSGLSYNCSLPLAFDGSCSGLQHFSAMLRDEIGGKAVNLLPSAEYQDIYRIVSDKVNEMLKQDLINGTSTTVETVTDKKTGEITQRTKYGTKVMAQWWLEHGVNRGVTKRSVMTLVYGALEFGFRDQVLSDTIQKAIDNGKGDMFLNPNQAAGYMAKLIWNAVSGTVVAAVEAMNWLKSAAKLLAAEVKDRKTDTVLRGRCAVHWVTPDGFPVWQEYKKPIQTRLNLMFLGQFRLQPTINTNKDSEIDARKQVSGIAPNFVHSLDGNHLRMTVVWAHEKYGIESFALIHDSFGTIPADAANLFKAVRETFVDTYESCDVLADFYDQIADQLHESQRDKMPALPAKGNLNLRDILKSDFAFA

SEQ ID NO: 1949 - DNA, 2670 bp, synthetic construct
  misc_feature 1..2670: note = Variant of RNA polymerase
  source 1..2670: mol_type = other DNA
atgcaccatcaccatcaccatatgaacacgattaacattgctaagaacgacttctctgacatcgaactggctgctatcccgttcaacactctggctgaccattacggtgagcgtttagctcgcgaacagttggcccttgagcatgagtcttacgagatgggtgaagcacgcttccgcaagatgtttgagcgtcaacttaaagctggtgaggttgcggataacgctgccgccaagcctctcatcactaccctactccctaagatgattgcacgcatcaacgactggtttgaggaagtgaaagccaagcgcggcaagcgcccgacagccttccagttcctgcaagaaatcaagccggaagccgtagcgtacatcaccattaagaccactctggcttgcctaaccagtgcggacaatacaaccgttcaggctgtagcaagcgcaatcggtaaagccattgaggacgaggctcgcttcggtcgtatccgtgaccttgaagctaagcacttcaagaagaacgttgaggaacaactcaacaagcgcgtagggcacgtctacaagaaagcatttatgcaagttgtcgagcacgacatgctctctaagggtctactcgggggcgtggtatggtcgtcgtggcataaggaagactctattcatgtaggagtacgctgcatcgagatgctcattgagtcaaccggaatggttagcttacaccgccaaaatgctggcgtagtaggtcaagactctgagcgtatcgaactcgcacctgaatacgctgaggctatcgcaacccgtgcaggtgcgctggctggcatctctccgatgttccaaccttgcgtagttcctcctaagccgtggactggcattactggtggtggctattgggctgcggggcgcaaacccctgcagttagtacgtactcgcagtctggcggcgcttcgccgctatgaagaagtgtcgatgccggaggtcatcaaagcagtcaacattgcgcagaatacagcatggcgtattaacaagaaagttctcgacgtagcgaataccatcacccaatggaaacactgtccagtcgcagatatccctgcgatggatcgtggcgaaatgccagctcgtccgttggacatcgataccaacgagattgcacttaaagcgtggaagaaagaagcttccgcgttctaccgcaaagacaaagcacgcgttagccgtcgtctgtcaatggagtttatgttatctcaggcgaacaagtttgcgaattatgaggcaatctggtttccgtggaacatggattggcgtgggcgcgtgtacgctgtcccgatgttcaatcctcagggcaacgatatgacgaaaggcctgctgacctttgcgcaggagaaacccattggtgaagacggcttctattggctcaagattcatggcgcaaggacagctggagtggataaagtaccgtttccacaacgcatcaaatttgttgaggataaccatacgaatattatggaatgcgcgaaagcaccgctggaaaacacttggtgggcggaacaggactcgccgttctgctttctggcgttctgctttgagtatgctggcgtcatcaatagtggtctgtcgtacaactgtagcttgcctctggcattcgatggtagttgctccggcctgcaacatttctcagcgatgttacgcgacgaaattggcggcaaagctgtgaatctcctcccatctgcggaataccaggatatttatcgtatcgtcagcgacaaagttaacgagatgctgaaacaagatctgattaacggtacctctaccaccgtggaaacggtgactgataagaagacaggcgaaattacccaacgcacgaaatacgggaccaaagttatggcacagtggtggttagaacacggtgtgaatcgtggcgtcacgaaacgctcggttatgactttggtgtatggggcgctggagtttggattccgcgatcaagtgctgagtgacaccattcaaaaagcgatcgataacggcaagggtgacatgtttctgaatccgaatcaggctgctggttacatggcgaaactgatctggaacgcagtgtccgggaccgtagtcgcagcagttgaggcgatgaactggctgaaaagtgcggcgaaattacttgctgctgaagtgaaggatcgtaagacggatacagttctgcgtggccgctgcgcagtacattgggtgactcccgacggcttccctgtgtggcaggaatacaagaagcctattcagacgcgcttgaacctgatgttcctcggtcagttccgcttacagcctaccattaacaccaacaaagatagcgagattgatgcgcgcaaacaggtgtctggtatcgctcctaactttgtacacagcctggacggtaaccaccttcgtatgactgtagtgtgggcacacgagaagtacggaatcgaatcttttgcactgattcacgactccttcggtaccattccggctgacgctgcgaacctgttcaaagcagtgcgcgaaactttcgttgacacatatgagtcttgtgatgtactggctgatttctacgaccagattgctgaccagttgcacgagtctcaacgcgacaaaatgccagcacttccggctaaaggtaacttgaacctccgtgacatcttaaaatcggacttcgcgttcgcg

SEQ ID NO: 1950 - protein, 890 aa, synthetic construct
  REGION 1..890: note = Variant of RNA polymerase
MHHHHHHMNTINIAKNDFSDIELAAIPFNTLADHYGERLAREQLALEHESYEMGEARFRKMFERQLKAGEVADNAAAKPLITTLLPKMIARINDWFEEVKAKRGKRPTAFQFLQEIKPEAVAYITIKTTLACLTSADNTTVQAVASAIGKAIEDEARFGRIRDLEAKHFKKNVEEQLNKRVGHVYKKAFMQVVEHDMLSKGLLGGVVWSSWHKEDSIHVGVRCIEMLIESTGMVSLHRQNAGVVGQDSERIELAPEYAEAIATRAGALAGISPMFQPCVVPPKPWTGITGGGYWAAGRKPLQLVRTRSLAALRRYEEVSMPEVIKAVNIAQNTAWRINKKVLDVANTITQWKHCPVADIPAMDRGEMPARPLDIDTNEIALKAWKKEASAFYRKDKARVSRRLSMEFMLSQANKFANYEAIWFPWNMDWRGRVYAVPMFNPQGNDMTKGLLTFAQEKPIGEDGFYWLKIHGARTAGVDKVPFPQRIKFVEDNHTNIMECAKAPLENTWWAEQDSPFCFLAFCFEYAGVINSGLSYNCSLPLAFDGSCSGLQHFSAMLRDEIGGKAVNLLPSAEYQDIYRIVSDKVNEMLKQDLINGTSTTVETVTDKKTGEITQRTKYGTKVMAQWWLEHGVNRGVTKRSVMTLVYGALEFGFRDQVLSDTIQKAIDNGKGDMFLNPNQAAGYMAKLIWNAVSGTVVAAVEAMNWLKSAAKLLAAEVKDRKTDTVLRGRCAVHWVTPDGFPVWQEYKKPIQTRLNLMFLGQFRLQPTINTNKDSEIDARKQVSGIAPNFVHSLDGNHLRMTVVWAHEKYGIESFALIHDSFGTIPADAANLFKAVRETFVDTYESCDVLADFYDQIADQLHESQRDKMPALPAKGNLNLRDILKSDFAFA

SEQ ID NO: 1951 - DNA, 2670 bp, synthetic construct
  misc_feature 1..2670: note = Variant of RNA polymerase
  source 1..2670: mol_type = other DNA
atgcaccatcaccatcaccatatgaacacgattaacattgctaagaacgacttctctgacatcgaactggctgctatcccgttcaacactctggctgaccattacggtgagcgtttagctcgcgaacagttggcccttgagcatgagtcttacgagatgggtgaagcacgcttccgcaagatgtttgagcgtcaacttaaagctggtgaggttgcggataacgctgccgccaagcctctcatcactaccctactccctaagatgattgcacgcatcaacgactggtttgaggaagtgaaagccaagcgcggcaagcgcccgacagccttccagttcctgcaagaaatcaagccggaagccgtagcgtacatcaccattaagaccactctggcttgcctaaccagtgcggacaatacaaccgttcaggctgtagcaagcgcaatcggtaaagccattgaggacgaggctcgcttcggtcgtatccgtgaccttgaagctaagcacttcaagaagaacgttgaggaacaactcaacaagcgcgtagggcacgtctacaagaaagcatttatgcaagttgtcgagcacgacatgctctctaagggtctactcgggggcgtggtatggtcgtcgtggcataaggaagactctattcatgtaggagtacgctgcatcgagatgctcattgagtcaaccggaatggttagcttacaccgccaaaatgctggcgtagtaggtcaagactctgagcgtatcgaactcgcacctgaatacgctgaggctatcgcaacccgtgcaggtgcgctggctggcatctctccgatgttccaaccttgcgtagttcctcctaagccgtggactggcattactggtggtggctattgggctgcggggcgcaaacccctgcagttagtacgtactcgcagtctggcggcgcttcgccgctatgaagaagtgtcgatgccggaggtcatcaaagcagtcaacattgcgcagaatacagcatggcgtattaacaagaaagttctcgacgtagcgaataccatcacccaatggaaacactgtccagtcgcagatatccctgcgatggatcgtggcgaaatgccagctcgtccgttggacatcgataccaacgagattgcacttaaagcgtggaagaaagaagcttccgcgttctaccgcaaagacaaagcacgcgttagccgtcgtctgtcaatggagtttatgttatctcaggcgaacaagtttgcgaattatgaggcaatctggtttccgtggaacatggattggcgtgggcgcgtgtacgctgtcccgatgttcaatcctcagggcaacgatatgacgaaaggcctgctgacctttgcgcaggagaaacccattggtgaagacggcttctattggctcaagattcatggcgcaaatacagctggagtggataaagtaccgtttccacaacgcatcaaatttgttgaggataaccatacgaatattatggaatgcgcgaaagcaccgctggaaaacacttggtgggcggaacaggactcgccgttctgctttctggcgttctgctttgagtatgctggcgtcatcaatagtggtctgtcgtacaactgtagcttgcctctggcattcgatggtagttgctccggcctgcaacatttctcagcgatgttacgcgacgaaattggcggcaaagctgtgaatctcctcccatctgcggaataccaggatatttatcgtatcgtcagcgacaaagttaacgagatgctgaaacaagatctgattaacggtacctctaccaccgtggaaacggtgactgataagaagacaggcgaaattacccaacgcacgaaatacgggaccaaagttatggcacagtggtggttagaacacggtgtgaatcgtggcgtcacgaaacgctcggttatgactttggtgtatggggcgctggagtttggattccgcgatcaagtgctgagtgacaccattcaaaaagcgatcgataacggcaagggtgacatgtttctgaatccgaatcaggctgctggttacatggcgaaactgatctggaacgcagtgtccgggaccgtagtcgcagcagttgaggcgatgaactggctgaaaagtgcggcgaaattacttgctgctgaagtgaaggatcgtaagacggatacagttctgcgtggccgctgcgcagtacattgggtgactcccgacggcttccctgtgtggcaggaatacaagaagcctattcagacgcgcttgaacctgatgttcctcggtaagttccgcttacagcctaccattaacaccaacaaagatagcgagattgatgcgcgcaaacaggtgtctggtatcgctcctaactttgtacacagcctggacggtaaccaccttcgtatgactgtagtgtgggcacacgagaagtacggaatcgaatcttttgcactgattcacgactccttcggtaccattccggctgacgctgcgaacctgttcaaagcagtgcgcgaaactttcgttgacacatatgagtcttgtgatgtactggctgatttctacgaccagattgctgaccagttgcacgagtctcaacgcgacaaaatgccagcacttccggctaaaggtaacttgaacctccgtgacatcttaaaatcggacttcgcgttcgcg

SEQ ID NO: 1952 - protein, 890 aa, synthetic construct
  REGION 1..890: note = Variant of RNA polymerase
MHHHHHHMNTINIAKNDFSDIELAAIPFNTLADHYGERLAREQLALEHESYEMGEARFRKMFERQLKAGEVADNAAAKPLITTLLPKMIARINDWFEEVKAKRGKRPTAFQFLQEIKPEAVAYITIKTTLACLTSADNTTVQAVASAIGKAIEDEARFGRIRDLEAKHFKKNVEEQLNKRVGHVYKKAFMQVVEHDMLSKGLLGGVVWSSWHKEDSIHVGVRCIEMLIESTGMVSLHRQNAGVVGQDSERIELAPEYAEAIATRAGALAGISPMFQPCVVPPKPWTGITGGGYWAAGRKPLQLVRTRSLAALRRYEEVSMPEVIKAVNIAQNTAWRINKKVLDVANTITQWKHCPVADIPAMDRGEMPARPLDIDTNEIALKAWKKEASAFYRKDKARVSRRLSMEFMLSQANKFANYEAIWFPWNMDWRGRVYAVPMFNPQGNDMTKGLLTFAQEKPIGEDGFYWLKIHGANTAGVDKVPFPQRIKFVEDNHTNIMECAKAPLENTWWAEQDSPFCFLAFCFEYAGVINSGLSYNCSLPLAFDGSCSGLQHFSAMLRDEIGGKAVNLLPSAEYQDIYRIVSDKVNEMLKQDLINGTSTTVETVTDKKTGEITQRTKYGTKVMAQWWLEHGVNRGVTKRSVMTLVYGALEFGFRDQVLSDTIQKAIDNGKGDMFLNPNQAAGYMAKLIWNAVSGTVVAAVEAMNWLKSAAKLLAAEVKDRKTDTVLRGRCAVHWVTPDGFPVWQEYKKPIQTRLNLMFLGKFRLQPTINTNKDSEIDARKQVSGIAPNFVHSLDGNHLRMTVVWAHEKYGIESFALIHDSFGTIPADAANLFKAVRETFVDTYESCDVLADFYDQIADQLHESQRDKMPALPAKGNLNLRDILKSDFAFA

SEQ ID NO: 1953 - DNA, 2670 bp, synthetic construct
  misc_feature 1..2670: note = Variant of RNA polymerase
  source 1..2670: mol_type = other DNA
atgcaccatcaccatcaccatatgaacacgattaacattgctaagaacgacttctctgacatcgaactggctgctatcccgttcaacactctggctgaccattacggtgagcgtttagctcgcgaacagttggcccttgagcatgagtcttacgagatgggtgaagcacgcttccgcaagatgtttgagcgtcaacttaaagctggtgaggttgcggataacgctgccgccaagcctctcatcactaccctactccctaagatgattgcacgcatcaacgactggtttgaggaagtgaaagccaagcgcggcaagcgcccgacagccttccagttcctgcaagaaatcaagccggaagccgtagcgtacatcaccattaagaccactctggcttgcctaaccagtgcggacaatacaaccgttcaggctgtagcaagcgcaatcggtaaagccattgaggacgaggctcgcttcggtcgtatccgtgaccttgaagctaagcacttcaagaagaacgttgaggaacaactcaacaagcgcgtagggcacgtctacaagaaagcatttatgcaagttgtcgagcacgacatgctctctaagggtctactcgggggcgtggtatggtcgtcgtggcataaggaagactctattcatgtaggagtacgctgcatcgagatgctcattgagtcaaccggaatggttagcttacaccgccaaaatgctggcgtagtaggtcaagactctgagcgtatcgaactcgcacctgaatacgctgaggctatcgcaacccgtgcaggtgcgctggctggcatctctccgatgttccaaccttgcgtagttcctcctaagccgtggactggcattactggtggtggctattgggctgcggggcgcaaacccctgcagttagtacgtactcgcagtctggcggcgcttcgccgctatgaagaagtgtcgatgccggaggtcatcaaagcagtcaacattgcgcagaatacagcatggcgtattaacaagaaagttctcgacgtagcgaataccatcacccaatggaaacactgtccagtcgcagatatccctgcgatggatcgtggcgaaatgccagctcgtccgttggacatcgataccaacgagattgcacttaaagcgtggaagaaagaagcttccgcgttctaccgcaaagacaaagcacgcgttagccgtcgtctgtcaatggagtttatgttatctcaggcgaacaagtttgcgaattatgaggcaatctggtttccgtggaacatggattggcgtgggcgcgtgtacgctgtcccgatgttcaatcctcagggcaacgatatgacgaaaggcctgctgacctttgcgcaggagaaacccattggtgaagacggcttctattggctcaagattcatggcgcaaatacagctggagtggataaagtaccgtttccacaacgcatcaaatttgttgaggataaccatacgaatattatggaatgcgcgaaagcaccgctggaaaacacttggtgggcggaacaggactcgccgttctgctttctggcgttctgctttgagtatgctggcgtcatcaatagtggtctgtcgtacaactgtagcttgcctctggcattcgatggtagttgctccggcctgcaacatttctcagcgatgttacgcgacgaaattggcggcaaagctgtgaatctcctcccatctgcggaataccaggatatttatcgtatcgtcagcgacaaagttaacgagatgctgaaacaagatctgattaacggtacctctaccaccgtggaaacggtgactgataagaagacaggcgaaattacccaacgcacgaaatacgggaccaaagttatggcacagtggtggttagaacacggtgtgaatcgtggcgtcacgaaacgctcggttatgactttggtgtatggggcgctggagtttggattccgcgatcaagtgctgagtgacaccattcaaaaagcgatcgataacggcaagggtgacatgtttctgaatccgaatcaggctgctggttacatggcgaaactgatctggaacgcagtgtccgggaccgtagtcgcagcagttgaggcgatgaactggctgaaaagtgcggcgaaattacttgctgctgaagtgaaggatcgtaagacggatacagttctgcgtggccgctgcgcagtacattgggtgactcccgacggcttccctgtgtggcaggaatacaagaagcctattcagacgcgcttgaacctgatgttcctcggtcagttccgcttacagcctaccattaacaccaacaaagatagcgagattgatgcgcgcaaacaggtgtctggtatcgctcctaactttgtacacagcctggacggtaaccaccttcgtatgactgtagtgtgggcacacgagaagtacggaatcgaatcttttgcactgattcacgactccttcggtaccattccggctgacgctgcgaacctgttcaaagcagtgcgcgaaactttcgttgacacatatgagtcttgtgatgtactggctgatttctacgacgcgattgctgaccagttgcacgagtctcaacgcgacaaaatgccagcacttccggctaaaggtaacttgaacctccgtgacatcttaaaatcggacttcgcgttcgcg

SEQ ID NO: 1954 - protein, 890 aa, synthetic construct
  REGION 1..890: note = Variant of RNA polymerase
MHHHHHHMNTINIAKNDFSDIELAAIPFNTLADHYGERLAREQLALEHESYEMGEARFRKMFERQLKAGEVADNAAAKPLITTLLPKMIARINDWFEEVKAKRGKRPTAFQFLQEIKPEAVAYITIKTTLACLTSADNTTVQAVASAIGKAIEDEARFGRIRDLEAKHFKKNVEEQLNKRVGHVYKKAFMQVVEHDMLSKGLLGGVVWSSWHKEDSIHVGVRCIEMLIESTGMVSLHRQNAGVVGQDSERIELAPEYAEAIATRAGALAGISPMFQPCVVPPKPWTGITGGGYWAAGRKPLQLVRTRSLAALRRYEEVSMPEVIKAVNIAQNTAWRINKKVLDVANTITQWKHCPVADIPAMDRGEMPARPLDIDTNEIALKAWKKEASAFYRKDKARVSRRLSMEFMLSQANKFANYEAIWFPWNMDWRGRVYAVPMFNPQGNDMTKGLLTFAQEKPIGEDGFYWLKIHGANTAGVDKVPFPQRIKFVEDNHTNIMECAKAPLENTWWAEQDSPFCFLAFCFEYAGVINSGLSYNCSLPLAFDGSCSGLQHFSAMLRDEIGGKAVNLLPSAEYQDIYRIVSDKVNEMLKQDLINGTSTTVETVTDKKTGEITQRTKYGTKVMAQWWLEHGVNRGVTKRSVMTLVYGALEFGFRDQVLSDTIQKAIDNGKGDMFLNPNQAAGYMAKLIWNAVSGTVVAAVEAMNWLKSAAKLLAAEVKDRKTDTVLRGRCAVHWVTPDGFPVWQEYKKPIQTRLNLMFLGQFRLQPTINTNKDSEIDARKQVSGIAPNFVHSLDGNHLRMTVVWAHEKYGIESFALIHDSFGTIPADAANLFKAVRETFVDTYESCDVLADFYDAIADQLHESQRDKMPALPAKGNLNLRDILKSDFAFA

SEQ ID NO: 1955 - DNA, 2670 bp, synthetic construct
  misc_feature 1..2670: note = Variant of RNA polymerase
  source 1..2670: mol_type = other DNA
atgcaccatcaccatcaccatatgaacacgattaacattgctaagaacgacttctctgacatcgaactggctgctatcccgttcaacactctggctgaccattacggtgagcgtttagctcgcgaacagttggcccttgagcatgagtcttacgagatgggtgaagcacgcttccgcaagatgtttgagcgtcaacttaaagctggtgaggttgcggataacgctgccgccaagcctctcatcactaccctactccctaagatgattgcacgcatcaacgactggtttgaggaagtgaaagccaagcgcggcaagcgcccgacagccttccagttcctgcaagaaatcaagccggaagccgtagcgtacatcaccattaagaccactctggcttgcctaaccagtgcggacaatacaaccgttcaggctgtagcaagcgcaatcggtaaagccattgaggacgaggctcgcttcggtcgtatccgtgaccttgaagctaagcacttcaagaagaacgttgaggaacaactcaacaagcgcgtagggcacgtctacaagaaagcatttatgcaagttgtcgagcacgacatgctctctaagggtctactcgggggcgtggtatggtcgtcgtggcataaggaagactctattcatgtaggagtacgctgcatcgagatgctcattgagtcaaccggaatggttagcttacaccgccaaaatgctggcgtagtaggtcaagactctgagcgtatcgaactcgcacctgaatacgctgaggctatcgcaacccgtgcaggtgcgctggctggcatctctccgatgttccaaccttgcgtagttcctcctaagccgtggactggcattactggtggtggctattgggctgcggggcgcaaacccctgcagttagtacgtactcgcagtctggcggcgcttcgccgctatgaagaagtgtcgatgccggaggtcatcaaagcagtcaacattgcgcagaatacagcatggcgtattaacaagaaagttctcgacgtagcgaataccatcacccaatggaaacactgtccagtcgcagatatccctgcgatggatcgtggcgaaatgccagctcgtccgttggacatcgataccaacgagattgcacttaaagcgtggaagaaagaagcttccgcgttctaccgcaaagacaaagcacgcgttagccgtcgtctgtcaatggagtttatgttatctcaggcgaacaagtttgcgaattatgaggcaatctggtttccgtggaacatggattggcgtgggcgcgtgtacgctgtcccgatgttcaatcctcagggcaacgatatgacgaaaggcctgctgacctttgcgcaggagaaacccattggtgaagacggcttctattggctcaagattcatggcgcaaatacagctggagtggataaagtaccgtttccacaacgcatcaaatttgttgaggataaccatacgaatattatggaatgcgcgaaagcaccgctggaaaacacttggtgggcggaacaggactcgccgttctgctttctggcgttctgctttgagtatgctggcgtcatcaatagtggtctgtcgtacaactgtagcttgcctctggcattcgatggtagttgctccggcctgcaacatttctcagcgatgttacgcgacgaaattggcggcaaagctgtgaatctcctcccatctgcggaataccaggatatttatcgtatcgtcagcgacaaagttaacgagatgctgaaacaagatctgattaacggtacctctaccaccgtggaaacggtgactgataagaagacaggcgaaattacccaacgcacgaaatacgggaccaaagttatggcacagtggtggttagaacacggtgtgaatcgtggcgtcacgaaacgctcggttatgactttggtgtatggggcgctggagtttggattccgcgatcaagtgctgagtgacaccattcaaaaagcgatcgataacggcaagggtgacatgtttctgaatccgaatcaggctgctggttacatggcgaaactgatctggaacgcagtgtccgggaccgtagtcgcagcagttgaggcgatgaactggctgaaaagtgcggcgaaattacttgctgctgaagtgaaggatcgtaagacggatacagttctgcgtggccgctgcgcagtacattgggtgactcccgacggcttccctgtgtggcaggaatacaagaagcctattcagacgcgcttgaacctgatgttcctcggtcagttccgcttacagcctaccattaacaccaacaaagatagcgagattgatgcgcgcaaacaggtgtctggtatcgctcctaactttgtacacagcctggacggtaaccaccttcgtatgactgtagtgtgggcacacgagaagtacggaatcgaatcttttgcactgattcacgactccttcggtaccattccggctgacgctgcgaacctgttcaaagcagtgcgcgaaactttcgtttctacatatgagtcttgtgatgtactggctgatttctacgaccagattgctgaccagttgcacgagtctcaacgcgacaaaatgccagcacttccggctaaaggtaacttgaacctccgtgacatcttaaaatcggacttcgcgttcgcg

SEQ ID NO: 1956 - protein, 890 aa, synthetic construct
  REGION 1..890: note = Variant of RNA polymerase
MHHHHHHMNTINIAKNDFSDIELAAIPFNTLADHYGERLAREQLALEHESYEMGEARFRKMFERQLKAGEVADNAAAKPLITTLLPKMIARINDWFEEVKAKRGKRPTAFQFLQEIKPEAVAYITIKTTLACLTSADNTTVQAVASAIGKAIEDEARFGRIRDLEAKHFKKNVEEQLNKRVGHVYKKAFMQVVEHDMLSKGLLGGVVWSSWHKEDSIHVGVRCIEMLIESTGMVSLHRQNAGVVGQDSERIELAPEYAEAIATRAGALAGISPMFQPCVVPPKPWTGITGGGYWAAGRKPLQLVRTRSLAALRRYEEVSMPEVIKAVNIAQNTAWRINKKVLDVANTITQWKHCPVADIPAMDRGEMPARPLDIDTNEIALKAWKKEASAFYRKDKARVSRRLSMEFMLSQANKFANYEAIWFPWNMDWRGRVYAVPMFNPQGNDMTKGLLTFAQEKPIGEDGFYWLKIHGANTAGVDKVPFPQRIKFVEDNHTNIMECAKAPLENTWWAEQDSPFCFLAFCFEYAGVINSGLSYNCSLPLAFDGSCSGLQHFSAMLRDEIGGKAVNLLPSAEYQDIYRIVSDKVNEMLKQDLINGTSTTVETVTDKKTGEITQRTKYGTKVMAQWWLEHGVNRGVTKRSVMTLVYGALEFGFRDQVLSDTIQKAIDNGKGDMFLNPNQAAGYMAKLIWNAVSGTVVAAVEAMNWLKSAAKLLAAEVKDRKTDTVLRGRCAVHWVTPDGFPVWQEYKKPIQTRLNLMFLGQFRLQPTINTNKDSEIDARKQVSGIAPNFVHSLDGNHLRMTVVWAHEKYGIESFALIHDSFGTIPADAANLFKAVRETFVSTYESCDVLADFYDQIADQLHESQRDKMPALPAKGNLNLRDILKSDFAFA

SEQ ID NO: 1957 - DNA, 2670 bp, synthetic construct
  misc_feature 1..2670: note = Variant of RNA polymerase
  source 1..2670: mol_type = other DNA
atgcaccatcaccatcaccatatgaacacgattaacattgctaagaacgacttctctgacatcgaactggctgctatcccgttcaacactctggctgaccattacggtgagcgtttagctcgcgaacagttggcccttgagcatgagtcttacgagatgggtgaagcacgcttccgcaagatgtttgagcgtcaacttaaagctggtgaggttgcggataacgctgccgccaagcctctcatcactaccctactccctaagatgattgcacgcatcaacgactggtttgaggaagtgaaagccaagcgcggcaagcgcccgacagccttccagttcctgcaagaaatcaagccggaagccgtagcgtacatcaccattaagaccactctggcttgcctaaccagtgcggacaatacaaccgttcaggctgtagcaagcgcaatcggtaaagccattgaggacgaggctcgcttcggtcgtatccgtgaccttgaagctaagcacttcaagaagaacgttgaggaacaactcaacaagcgcgtagggcacgtctacaagaaagcatttatgcaagttgtcgagcacgacatgctctctaagggtctactcgggggcgtggtatggtcgtcgtggcataaggaagactctattcatgtaggagtacgctgcatcgagatgctcattgagtcaaccggaatggttagcttacaccgccaaaatgctggcgtagtaggtcaagactctgagcgtatcgaactcgcacctgaatacgctgaggctatcgcaacccgtgcaggtgcgctggctggcatctctccgatgttccaaccttgcgtagttcctcctaagccgtggactggcatttttggtggtggctattgggctgcggggcgcaaacccctgcagttagtacgtactcgcagtctggcggcgcttcgccgctatgaagaagtgtcgatgccggaggtcatcaaagcagtcaacattgcgcagaatacagcatggcgtattaacaagaaagttctcgacgtagcgaataccatcacccaatggaaacactgtccagtcgcagatatccctgcgatggatcgtggcgaaatgccagctcgtccgttggacatcgataccaacgagattgcacttaaagcgtggaagaaagaagcttccgcgttctaccgcaaagacaaagcacgcgttagccgtcgtctgtcaatggagtttatgttatctcaggcgaacaagtttgcgaattatgaggcaatctggtttccgtggaacatggattggcgtgggcgcgtgtacgctgtcccgatgttcaatcctcagggcaacgatatgacgaaaggcctgctgacctttgcgcaggagaaacccattggtgaagacggcttctattggctcaagattcatggcgcaaatacagctggagtggataaagtaccgtttccacaacgcatcaaatttgttgaggataaccatacgaatattatggaatgcgcgaaagcaccgctggaaaacacttggtgggcggaacaggactcgccgttctgctttctggcgttctgctttgagtatgctggcgtcatcaatagtggtctgtcgtacaactgtagcttgcctctggcattcgatggtagttgctccggcctgcaacatttctcagcgatgttacgcgacgaaattggcggcaaagctgtgaatctcctcccatctgcggaataccaggatatttatcgtatcgtcagcgacaaagttaacgagatgctgaaacaagatctgattaacggtacctctaccaccgtggaaacggtgactgataagaagacaggcgaaattacccaacgcacgaaatacgggaccaaagttatggcacagtggtggttagaacacggtgtgaatcgtggcgtcacgaaacgctcggttatgactttggtgtatggggcgctggagtttggattccgcgatcaagtgctgagtgacaccattcaaaaagcgatcgataacggcaagggtgacatgtttctgaatccgaatcaggctgctggttacatggcgaaactgatctggaacgcagtgtccgggaccgtagtcgcagcagttgaggcgatgaactggctgaaaagtgcggcgaaattacttgctgctgaagtgaaggatcgtaagacggatacagttctgcgtggccgctgcgcagtacattgggtgactcccgacggcttccctgtgtggcaggaatacaagaagcctattcagacgcgcttgaacctgatgttcctcggtcagttccgcttacagcctaccattaacaccaacaaagatagcgagattgatgcgcgcaaacaggtgtctggtatcgctcctaactttgtacacagcctggacggtaaccaccttcgtatgactgtagtgtgggcacacgagaagtacggaatcgaatcttttgcactgattcacgactccttcggtaccattccggctgacgctgcgaacctgttcaaagcagtgcgcgaaactttcgttgacacatatgagtcttgtgatgtactggctgatttctacgaccagattgctgaccagttgcacgagtctcaacgcgacaaaatgccagcacttccggctaaaggtaacttgaacctccgtgacatcttaaaatcggacttcgcgttcgcg

SEQ ID NO: 1958 - protein, 890 aa, synthetic construct
  REGION 1..890: note = Variant of RNA polymerase
MHHHHHHMNTINIAKNDFSDIELAAIPFNTLADHYGERLAREQLALEHESYEMGEARFRKMFERQLKAGEVADNAAAKPLITTLLPKMIARINDWFEEVKAKRGKRPTAFQFLQEIKPEAVAYITIKTTLACLTSADNTTVQAVASAIGKAIEDEARFGRIRDLEAKHFKKNVEEQLNKRVGHVYKKAFMQVVEHDMLSKGLLGGVVWSSWHKEDSIHVGVRCIEMLIESTGMVSLHRQNAGVVGQDSERIELAPEYAEAIATRAGALAGISPMFQPCVVPPKPWTGIFGGGYWAAGRKPLQLVRTRSLAALRRYEEVSMPEVIKAVNIAQNTAWRINKKVLDVANTITQWKHCPVADIPAMDRGEMPARPLDIDTNEIALKAWKKEASAFYRKDKARVSRRLSMEFMLSQANKFANYEAIWFPWNMDWRGRVYAVPMFNPQGNDMTKGLLTFAQEKPIGEDGFYWLKIHGANTAGVDKVPFPQRIKFVEDNHTNIMECAKAPLENTWWAEQDSPFCFLAFCFEYAGVINSGLSYNCSLPLAFDGSCSGLQHFSAMLRDEIGGKAVNLLPSAEYQDIYRIVSDKVNEMLKQDLINGTSTTVETVTDKKTGEITQRTKYGTKVMAQWWLEHGVNRGVTKRSVMTLVYGALEFGFRDQVLSDTIQKAIDNGKGDMFLNPNQAAGYMAKLIWNAVSGTVVAAVEAMNWLKSAAKLLAAEVKDRKTDTVLRGRCAVHWVTPDGFPVWQEYKKPIQTRLNLMFLGQFRLQPTINTNKDSEIDARKQVSGIAPNFVHSLDGNHLRMTVVWAHEKYGIESFALIHDSFGTIPADAANLFKAVRETFVDTYESCDVLADFYDQIADQLHESQRDKMPALPAKGNLNLRDILKSDFAFA

SEQ ID NO: 1959 - DNA, 2670 bp, synthetic construct
  misc_feature 1..2670: note = Variant of RNA polymerase
  source 1..2670: mol_type = other DNA
atgcaccatcaccatcaccatatgaacacgattaacattgctaagaacgacttctctgacatcgaactggctgctatcccgttcaacactctggctgaccattacggtgagcgtttagctcgcgaacagttggcccttgagcatgagtcttacgagatgggtgaagcacgcttccgcaagatgtttgagcgtcaacttaaagctggtgaggttgcggataacgctgccgccaagcctctcatcactaccctactccctaagatgattgcacgcatcaacgactggtttgaggaagtgaaagccaagcgcggcaagcgcccgacagccttccagttcctgcaagaaatcaagccggaagccgtagcgtacatcaccattaagaccactctggcttgcctaaccagtgcggacaatacaaccgttcaggctgtagcaagcgcaatcggtaaagccattgaggacgaggctcgcttcggtcgtatccgtgaccttgaagctaagcacttcaagaagaacgttgaggaacaactcaacaagcgcgtagggcacgtctacaagaaagcatttatgcaagttgtcgagcacgacatgctctctaagggtctactcgggggcgtggtatggtcgtcgtggcataaggaagactctattcatgtaggagtacgctgcatcgagatgctcattgagtcaaccggaatggttagcttacaccgccaaaatgctggcgtagtaggtcaagactctgagcgtatcgaactcgcacctgaatacgctgaggctatcgcaacccgtgcaggtgcgctggctggcatctctccgatgttccaaccttgcgtagttcctcctaagccgtggactggcattactggtggtggctattgggctgcggggcgcaaacccctgcagttagtacgtactcgcagtctggcggcgcttcgccgctatgaagaagtgtcgatgccggaggtcatcaaagcagtcaacattgcgcagaatacagcatggcgtattaacaagaaagttctcgacgtagcgaataccatcacccaatggaaacactgtccagtcgcagatatccctgcgatggatcgtggcgaagagccagctcgtccgttggacatcgataccaacgagattgcacttaaagcgtggaagaaagaagcttccgcgttctaccgcaaagacaaagcacgcgttagccgtcgtctgtcaatggagtttatgttatctcaggcgaacaagtttgcgaattatgaggcaatctggtttccgtggaacatggattggcgtgggcgcgtgtacgctgtcccgatgttcaatcctcagggcaacgatatgacgaaaggcctgctgacctttgcgcaggagaaacccattggtgaagacggcttctattggctcaagattcatggcgcaaatacagctggagtggataaagtaccgtttccacaacgcatcaaatttgttgaggataaccatacgaatattatggaatgcgcgaaagcaccgctggaaaacacttggtgggcggaacaggactcgccgttctgctttctggcgttctgctttgagtatgctggcgtcatcaatagtggtctgtcgtacaactgtagcttgcctctggcattcgatggtagttgctccggcctgcaacatttctcagcgatgttacgcgacgaaattggcggcaaagctgtgaatctcctcccatctgcggaataccaggatatttatcgtatcgtcagcgacaaagttaacgagatgctgaaacaagatctgattaacggtacctctaccaccgtggaaacggtgactgataagaagacaggcgaaattacccaacgcacgaaatacgggaccaaagttatggcacagtggtggttagaacacggtgtgaatcgtggcgtcacgaaacgctcggttatgactttggtgtatggggcgctggagtttggattccgcgatcaagtgctgagtgacaccattcaaaaagcgatcgataacggcaagggtgacatgtttctgaatccgaatcaggctgctggttacatggcgaaactgatctggaacgcagtgtccgggaccgtagtcgcagcagttgaggcgatgaactggctgaaaagtgcggcgaaattacttgctgctgaagtgaaggatcgtaagacggatacagttctgcgtggccgctgcgcagtacattgggtgactcccgacggcttccctgtgtggcaggaatacaagaagcctattcagacgcgcttgaacctgatgttcctcggtcagttccgcttacagcctaccattaacaccaacaaagatagcgagattgatgcgcgcaaacaggtgtctggtatcgctcctaactttgtacacagcctggacggtaaccaccttcgtatgactgtagtgtgggcacacgagaagtacggaatcgaatcttttgcactgattcacgactccttcggtaccattccggctgacgctgcgaacctgttcaaagcagtgcgcgaaactttcgttgacacatatgagtcttgtgatgtactggctgatttctacgaccagattgctgaccagttgcacgagtctcaacgcgacaaaatgccagcacttccggctaaaggtaacttgaacctccgtgacatcttaaaatcggacttcgcgttcgcg

SEQ ID NO: 1960 - protein, 890 aa, synthetic construct
  REGION 1..890: note = Variant of RNA polymerase
MHHHHHHMNTINIAKNDFSDIELAAIPFNTLADHYGERLAREQLALEHESYEMGEARFRKMFERQLKAGEVADNAAAKPLITTLLPKMIARINDWFEEVKAKRGKRPTAFQFLQEIKPEAVAYITIKTTLACLTSADNTTVQAVASAIGKAIEDEARFGRIRDLEAKHFKKNVEEQLNKRVGHVYKKAFMQVVEHDMLSKGLLGGVVWSSWHKEDSIHVGVRCIEMLIESTGMVSLHRQNAGVVGQDSERIELAPEYAEAIATRAGALAGISPMFQPCVVPPKPWTGITGGGYWAAGRKPLQLVRTRSLAALRRYEEVSMPEVIKAVNIAQNTAWRINKKVLDVANTITQWKHCPVADIPAMDRGEEPARPLDIDTNEIALKAWKKEASAFYRKDKARVSRRLSMEFMLSQANKFANYEAIWFPWNMDWRGRVYAVPMFNPQGNDMTKGLLTFAQEKPIGEDGFYWLKIHGANTAGVDKVPFPQRIKFVEDNHTNIMECAKAPLENTWWAEQDSPFCFLAFCFEYAGVINSGLSYNCSLPLAFDGSCSGLQHFSAMLRDEIGGKAVNLLPSAEYQDIYRIVSDKVNEMLKQDLINGTSTTVETVTDKKTGEITQRTKYGTKVMAQWWLEHGVNRGVTKRSVMTLVYGALEFGFRDQVLSDTIQKAIDNGKGDMFLNPNQAAGYMAKLIWNAVSGTVVAAVEAMNWLKSAAKLLAAEVKDRKTDTVLRGRCAVHWVTPDGFPVWQEYKKPIQTRLNLMFLGQFRLQPTINTNKDSEIDARKQVSGIAPNFVHSLDGNHLRMTVVWAHEKYGIESFALIHDSFGTIPADAANLFKAVRETFVDTYESCDVLADFYDQIADQLHESQRDKMPALPAKGNLNLRDILKSDFAFA

SEQ ID NO: 1961 - DNA, 2670 bp, synthetic construct
  misc_feature 1..2670: note = Variant of RNA polymerase
  source 1..2670: mol_type = other DNA
atgcaccatcaccatcaccatatgaacacgattaacattgctaagaacgacttctctgacatcgaactggctgctatcccgttcaacactctggctgaccattacggtgagcgtttagctcgcgaacagttggcccttgagcatgagtcttacgagatgggtgaagcacgcttccgcaagatgtttgagcgtcaacttaaagctggtgaggttgcggataacgctgccgccaagcctctcatcactaccctactccctaagatgattgcacgcatcaacgactggtttgaggaagtgaaagccaagcgcggcaagcgcccgacagccttccagttcctgcaagaaatcaagccggaagccgtagcgtacatcaccattaagaccactctggcttgcctaaccagtgcggacaatacaaccgttcaggctgtagcaagcgcaatcggtaaagccattgaggacgaggctcgcttcggtcgtatccgtgaccttgaagctaagcacttcaagaagaacgttgaggaacaactcaacaagcgcgtagggcacgtctacaagaaagcatttatgcaagttgtcgagcacgacatgctctctaagggtctactcgggggcgtggtatggtcgtcgtggcataaggaagactctattcatgtaggagtacgctgcatcgagatgctcattgagtcaaccggaatggttagcttacaccgccaaaatgctggcgtagtaggtcaagactctgagcgtatcgaactcgcacctgaatacgctgaggctatcgcaacccgtgcaggtgcgctggctggcatctctccgatgttccaaccttgcgtagttcctcctaagccgtggactggcattactggtggtggctattgggctgcggggcgcaaacccctgcagttagtacgtactcgcagtctggcggcgcttcgccgctatgaagaagtgtcgatgccggaggtcatcaaagcagtcaacattgcgcagaatacagcatggcgtattaacaagaaagttctcgacgtagcgaataccatcacccaatggaaacactgtccagtcgcagatatccctgcgatggatcgtggcgaaatgccagctcgtccgttggacatcgataccaacgagattgcacttaaagcgtggaagaaagaagcttccgcgttctaccgcaaagacaaagcacgcgttagccgtcgtctgtcaatggagtttatgttatctcaggcgaacaagtttgcgaattatgaggcaatctggtttccgtggaacatggattggcgtgggcgcgtgtacgctgtcccgatgttcaatcctcagggcaacgatatgacgaaaggcctgctgacctttgcgcaggagaaacccattggtgaagacggcttctattggctcaagattcatggcgcaaatacagctggagtggataaagtaccgtttccacaacgcatcaaatttgttgaggataaccatacgaatattatggaatgcgcgaaagcaccgctggaaaacacttggtgggcggaacaggactcgccgttctgctttctggcgttctgctttgagtatgctggcgtcatcaatagtggtctgtcgtacaactgtagcttgcctctggcattcgatggtagttgctccggcctgcaacatttctcagcgatgttacgcgacgaaattggcggcaaagctgtgaatctcctcccatctgcggaataccaggatatttatcgtatcgtcagcgacaaagttaacgagatgctgaaacaagatctgattaacggtacctctaccaccgtggaaacggtgactgataagaagacaggcgaaattacccaacgcacgaaatacgggaccaaagttatggcacagtggtggttagaacacggtgtgaatcgtggcgtcacgaaacgctcggttatgactttggtgtatggggcgctggagtttggattccgcgatcaagtgctgagtgacaccattcaaaaagcgatcgataacggcaagggtgacatgtttctgaatccgaatcaggctgctggttacatggcgaaactgatctggaacgcagtgtccgggaccgtagtcgcagcagttgaggcgatgaactggctgaaaaaggcggcgaaattacttgctgctgaagtgaaggatcgtaagacggatacagttctgcgtggccgctgcgcagtacattgggtgactcccgacggcttccctgtgtggcaggaatacaagaagcctattcagacgcgcttgaacctgatgttcctcggtcagttccgcttacagcctaccattaacaccaacaaagatagcgagattgatgcgcgcaaacaggtgtctggtatcgctcctaactttgtacacagcctggacggtaaccaccttcgtatgactgtagtgtgggcacacgagaagtacggaatcgaatcttttgcactgattcacgactccttcggtaccattccggctgacgctgcgaacctgttcaaagcagtgcgcgaaactttcgttgacacatatgagtcttgtgatgtactggctgatttctacgaccagattgctgaccagttgcacgagtctcaacgcgacaaaatgccagcacttccggctaaaggtaacttgaacctccgtgacatcttaaaatcggacttcgcgttcgcg

SEQ ID NO: 1962 - protein, 890 aa, synthetic construct
  REGION 1..890: note = Variant of RNA polymerase
MHHHHHHMNTINIAKNDFSDIELAAIPFNTLADHYGERLAREQLALEHESYEMGEARFRKMFERQLKAGEVADNAAAKPLITTLLPKMIARINDWFEEVKAKRGKRPTAFQFLQEIKPEAVAYITIKTTLACLTSADNTTVQAVASAIGKAIEDEARFGRIRDLEAKHFKKNVEEQLNKRVGHVYKKAFMQVVEHDMLSKGLLGGVVWSSWHKEDSIHVGVRCIEMLIESTGMVSLHRQNAGVVGQDSERIELAPEYAEAIATRAGALAGISPMFQPCVVPPKPWTGITGGGYWAAGRKPLQLVRTRSLAALRRYEEVSMPEVIKAVNIAQNTAWRINKKVLDVANTITQWKHCPVADIPAMDRGEMPARPLDIDTNEIALKAWKKEASAFYRKDKARVSRRLSMEFMLSQANKFANYEAIWFPWNMDWRGRVYAVPMFNPQGNDMTKGLLTFAQEKPIGEDGFYWLKIHGANTAGVDKVPFPQRIKFVEDNHTNIMECAKAPLENTWWAEQDSPFCFLAFCFEYAGVINSGLSYNCSLPLAFDGSCSGLQHFSAMLRDEIGGKAVNLLPSAEYQDIYRIVSDKVNEMLKQDLINGTSTTVETVTDKKTGEITQRTKYGTKVMAQWWLEHGVNRGVTKRSVMTLVYGALEFGFRDQVLSDTIQKAIDNGKGDMFLNPNQAAGYMAKLIWNAVSGTVVAAVEAMNWLKKAAKLLAAEVKDRKTDTVLRGRCAVHWVTPDGFPVWQEYKKPIQTRLNLMFLGQFRLQPTINTNKDSEIDARKQVSGIAPNFVHSLDGNHLRMTVVWAHEKYGIESFALIHDSFGTIPADAANLFKAVRETFVDTYESCDVLADFYDQIADQLHESQRDKMPALPAKGNLNLRDILKSDFAFA

SEQ ID NO: 1963 - DNA, 2670 bp, synthetic construct
  misc_feature 1..2670: note = Variant of RNA polymerase
  source 1..2670: mol_type = other DNA
atgcaccatcaccatcaccatatgaacacgattaacattgctaagaacgacttctctgacatcgaactggctgctatcccgttcaacactctggctgaccattacggtgagcgtttagctcgcgaacagttggcccttgagcatgagtcttacgagatgggtgaagcacgcttccgcaagatgtttgagcgtcaacttaaagctggtgaggttgcggataacgctgccgccaagcctctcatcactaccctactccctaagatgattgcacgcatcaacgactggtttgaggaagtgaaagccaagcgcggcaagcgcccgacagccttccagttcctgcaagaaatcaagccggaagccgtagcgtacatcaccattaagaccactctggcttgcctaaccagtgcggacaatacaaccgttcaggctgtagcaagcgcaatcggtaaagccattgaggacgaggctcgcttcggtcgtatccgtgaccttgaagctaagcacttcaagaagaacgttgaggaacaactcaacaagcgcgtagggcacgtctacaagaaagcatttatgcaagttgtcgagcacgacatgctctctaagggtctactcgggggcgtggtatggtcgtcgtggcataaggaagactctattcatgtaggagtacgctgcatcgagatgctcattgagtcaaccggaatggttagcttacaccgccaaaatgctggcgtagtaggtcaagactctgagcgtatcgaactcgcacctgaatacgctgaggctatcgcaacccgtgcaggtgcgctggctggcatctctccgatgttccaaccttgcgtagttcctcctaagccgtggactggcattactggtggtggctattgggctgcggggcgcaaacccctgcagttagtacgtactcgcagtctggcggcgcttcgccgctatgaagaagtgtcgatgccggaggtcatcaaagcagtcaacattgcgcagaatacagcatggcgtattaacaagaaagttctcgacgtagcgaataccatcacccaatggaaacactgtccagtcgcagatatccctgcgatggatcgtggcgaaatgccagctcgtccgttggacatcgataccaacgagattgcacttaaagcgtggaagaaagaagcttccgcgttctaccgcaaagacaaagcacgcgttagccgtcgtctgtcaatggagtggatgttatctcaggcgaacaagtttgcgaattatgaggcaatctggtttccgtggaacatggattggcgtgggcgcgtgtacgctgtcccgatgttcaatcctcagggcaacgatatgacgaaaggcctgctgacctttgcgcaggagaaacccattggtgaagacggcttctattggctcaagattcatggcgcaaatacagctggagtggataaagtaccgtttccacaacgcatcaaatttgttgaggataaccatacgaatattatggaatgcgcgaaagcaccgctggaaaacacttggtgggcggaacaggactcgccgttctgctttctggcgttctgctttgagtatgctggcgtcatcaatagtggtctgtcgtacaactgtagcttgcctctggcattcgatggtagttgctccggcctgcaacatttctcagcgatgttacgcgacgaaattggcggcaaagctgtgaatctcctcccatctgcggaataccaggatatttatcgtatcgtcagcgacaaagttaacgagatgctgaaacaagatctgattaacggtacctctaccaccgtggaaacggtgactgataagaagacaggcgaaattacccaacgcacgaaatacgggaccaaagttatggcacagtggtggttagaacacggtgtgaatcgtggcgtcacgaaacgctcggttatgactttggtgtatggggcgctggagtttggattccgcgatcaagtgctgagtgacaccattcaaaaagcgatcgataacggcaagggtgacatgtttctgaatccgaatcaggctgctggttacatggcgaaactgatctggaacgcagtgtccgggaccgtagtcgcagcagttgaggcgatgaactggctgaaaagtgcggcgaaattacttgctgctgaagtgaaggatcgtaagacggatacagttctgcgtggccgctgcgcagtacattgggtgactcccgacggcttccctgtgtggcaggaatacaagaagcctattcagacgcgcttgaacctgatgttcctcggtcagttccgcttacagcctaccattaacaccaacaaagatagcgagattgatgcgcgcaaacaggtgtctggtatcgctcctaactttgtacacagcctggacggtaaccaccttcgtatgactgtagtgtgggcacacgagaagtacggaatcgaatcttttgcactgattcacgactccttcggtaccattccggctgacgctgcgaacctgttcaaagcagtgcgcgaaactttcgttgacacatatgagtcttgtgatgtactggctgatttctacgaccagattgctgaccagttgcacgagtctcaacgcgacaaaatgccagcacttccggctaaaggtaacttgaacctccgtgacatcttaaaatcggacttcgcgttcgcg

SEQ ID NO: 1964 - protein, 890 aa, synthetic construct
  REGION 1..890: note = Variant of RNA polymerase
MHHHHHHMNTINIAKNDFSDIELAAIPFNTLADHYGERLAREQLALEHESYEMGEARFRKMFERQLKAGEVADNAAAKPLITTLLPKMIARINDWFEEVKAKRGKRPTAFQFLQEIKPEAVAYITIKTTLACLTSADNTTVQAVASAIGKAIEDEARFGRIRDLEAKHFKKNVEEQLNKRVGHVYKKAFMQVVEHDMLSKGLLGGVVWSSWHKEDSIHVGVRCIEMLIESTGMVSLHRQNAGVVGQDSERIELAPEYAEAIATRAGALAGISPMFQPCVVPPKPWTGITGGGYWAAGRKPLQLVRTRSLAALRRYEEVSMPEVIKAVNIAQNTAWRINKKVLDVANTITQWKHCPVADIPAMDRGEMPARPLDIDTNEIALKAWKKEASAFYRKDKARVSRRLSMEWMLSQANKFANYEAIWFPWNMDWRGRVYAVPMFNPQGNDMTKGLLTFAQEKPIGEDGFYWLKIHGANTAGVDKVPFPQRIKFVEDNHTNIMECAKAPLENTWWAEQDSPFCFLAFCFEYAGVINSGLSYNCSLPLAFDGSCSGLQHFSAMLRDEIGGKAVNLLPSAEYQDIYRIVSDKVNEMLKQDLINGTSTTVETVTDKKTGEITQRTKYGTKVMAQWWLEHGVNRGVTKRSVMTLVYGALEFGFRDQVLSDTIQKAIDNGKGDMFLNPNQAAGYMAKLIWNAVSGTVVAAVEAMNWLKSAAKLLAAEVKDRKTDTVLRGRCAVHWVTPDGFPVWQEYKKPIQTRLNLMFLGQFRLQPTINTNKDSEIDARKQVSGIAPNFVHSLDGNHLRMTVVWAHEKYGIESFALIHDSFGTIPADAANLFKAVRETFVDTYESCDVLADFYDQIADQLHESQRDKMPALPAKGNLNLRDILKSDFAFA

SEQ ID NO: 1965 - DNA, 2670 bp, synthetic construct
  misc_feature 1..2670: note = Variant of RNA polymerase
  source 1..2670: mol_type = other DNA
atgcaccatcaccatcaccatatgaacacgattaacattgctaagaacgacttctctgacatcgaactggctgctatcccgttcaacactctggctgaccattacggtgagcgtttagctcgcgaacagttggcccttgagcatgagtcttacgagatgggtgaagcacgcttccgcaagatgtttgagcgtcaacttaaagctggtgaggttgcggataacgctgccgccaagcctctcatcactaccctactccctaagatgattgcacgcatcaacgactggtttgaggaagtgaaagccaagcgcggcaagcgcccgacagccttccagttcctgcaagaaatcaagccggaagccgtagcgtacatcaccattaagaccactctggcttgcctaaccagtgcggacaatacaaccgttcaggctgtagcaagcgcaatcggtaaagccattgaggacgaggctcgcttcggtcgtatccgtgaccttgaagctaagcacttcaagaagaacgttgaggaacaactcaacaagcgcgtagggcacgtctacaagaaagcatttatgcaagttgtcgagcacgacatgctctctaagggtctactcgggggcgtggtatggtcgtcgtggcataaggaagactctattcatgtaggagtacgctgcatcgagatgctcattgagtcaaccggaatggttagcttacaccgccaaaatgctggcgtagtaggtcaagactctgagcgtatcgaactcgcacctgaatacgctgaggctatcgcaacccgtgcaggtgcgctggctggcatctctccgatgttccaaccttgcgtagttcctcctaagccgtggactggcattactggtggtggctattgggctgcggggcgcaaacccctgcagttagtacgtactcgcagtctggcggcgcttcgccgctatgaagaagtgtcgatgccggaggtcttgaaagcagtcaacattgcgcagaatacagcatggcgtattaacaagaaagttctcgacgtagcgaataccatcacccaatggaaacactgtccagtcgcagatatccctgcgatggatcgtggcgaaatgccagctcgtccgttggacatcgataccaacgagattgcacttaaagcgtggaagaaagaagcttccgcgttctaccgcaaagacaaagcacgcgttagccgtcgtctgtcaatggagtttatgttatctcaggcgaacaagtttgcgaattatgaggcaatctggtttccgtggaacatggattggcgtgggcgcgtgtacgctgtcccgatgttcaatcctcagggcaacgatatgacgaaaggcctgctgacctttgcgcaggagaaacccattggtgaagacggcttctattggctcaagattcatggcgcaaatacagctggagtggataaagtaccgtttccacaacgcatcaaatttgttgaggataaccatacgaatattatggaatgcgcgaaagcaccgctggaaaacacttggtgggcggaacaggactcgccgttctgctttctggcgttctgctttgagtatgctggcgtcatcaatagtggtctgtcgtacaactgtagcttgcctctggcattcgatggtagttgctccggcctgcaacatttctcagcgatgttacgcgacgaaattggcggcaaagctgtgaatctcctcccatctgcggaataccaggatatttatcgtatcgtcagcgacaaagttaacgagatgctgaaacaagatctgattaacggtacctctaccaccgtggaaacggtgactgataagaagacaggcgaaattacccaacgcacgaaatacgggaccaaagttatggcacagtggtggttagaacacggtgtgaatcgtggcgtcacgaaacgctcggttatgactttggtgtatggggcgctggagtttggattccgcgatcaagtgctgagtgacaccattcaaaaagcgatcgataacggcaagggtgacatgtttctgaatccgaatcaggctgctggttacatggcgaaactgatctggaacgcagtgtccgggaccgtagtcgcagcagttgaggcgatgaactggctgaaaagtgcggcgaaattacttgctgctgaagtgaaggatcgtaagacggatacagttctgcgtggccgctgcgcagtacattgggtgactcccgacggcttccctgtgtggcaggaatacaagaagcctattcagacgcgcttgaacctgatgttcctcggtcagttccgcttacagcctaccattaacaccaacaaagatagcgagattgatgcgcgcaaacaggtgtctggtatcgctcctaactttgtacacagcctggacggtaaccaccttcgtatgactgtagtgtgggcacacgagaagtacggaatcgaatcttttgcactgattcacgactccttcggtaccattccggctgacgctgcgaacctgttcaaagcagtgcgcgaaactttcgttgacacatatgagtcttgtgatgtactggctgatttctacgaccagattgctgaccagttgcacgagtctcaacgcgacaaaatgccagcacttccggctaaaggtaacttgaacctccgtgacatcttaaaatcggacttcgcgttcgcg

SEQ ID NO: 1966 - protein, 890 aa, synthetic construct
  REGION 1..890: note = Variant of RNA polymerase
MHHHHHHMNTINIAKNDFSDIELAAIPFNTLADHYGERLAREQLALEHESYEMGEARFRKMFERQLKAGEVADNAAAKPLITTLLPKMIARINDWFEEVKAKRGKRPTAFQFLQEIKPEAVAYITIKTTLACLTSADNTTVQAVASAIGKAIEDEARFGRIRDLEAKHFKKNVEEQLNKRVGHVYKKAFMQVVEHDMLSKGLLGGVVWSSWHKEDSIHVGVRCIEMLIESTGMVSLHRQNAGVVGQDSERIELAPEYAEAIATRAGALAGISPMFQPCVVPPKPWTGITGGGYWAAGRKPLQLVRTRSLAALRRYEEVSMPEVLKAVNIAQNTAWRINKKVLDVANTITQWKHCPVADIPAMDRGEMPARPLDIDTNEIALKAWKKEASAFYRKDKARVSRRLSMEFMLSQANKFANYEAIWFPWNMDWRGRVYAVPMFNPQGNDMTKGLLTFAQEKPIGEDGFYWLKIHGANTAGVDKVPFPQRIKFVEDNHTNIMECAKAPLENTWWAEQDSPFCFLAFCFEYAGVINSGLSYNCSLPLAFDGSCSGLQHFSAMLRDEIGGKAVNLLPSAEYQDIYRIVSDKVNEMLKQDLINGTSTTVETVTDKKTGEITQRTKYGTKVMAQWWLEHGVNRGVTKRSVMTLVYGALEFGFRDQVLSDTIQKAIDNGKGDMFLNPNQAAGYMAKLIWNAVSGTVVAAVEAMNWLKSAAKLLAAEVKDRKTDTVLRGRCAVHWVTPDGFPVWQEYKKPIQTRLNLMFLGQFRLQPTINTNKDSEIDARKQVSGIAPNFVHSLDGNHLRMTVVWAHEKYGIESFALIHDSFGTIPADAANLFKAVRETFVDTYESCDVLADFYDQIADQLHESQRDKMPALPAKGNLNLRDILKSDFAFA

SEQ ID NO: 1967 - DNA, 2670 bp, synthetic construct
  misc_feature 1..2670: note = Variant of RNA polymerase
  source 1..2670: mol_type = other DNA
atgcaccatcaccatcaccatatgaacacgattaacattgctaagaacgacttctctgacatcgaactggctgctatcccgttcaacactctggctgaccattacggtgagcgtttagctcgcgaacagttggcccttgagcatgagtcttacgagatgggtgaagcacgcttccgcaagatgtttgagcgtcaacttaaagctggtgaggttgcggataacgctgccgccaagcctctcatcactaccctactccctaagatgattgcacgcatcaacgactggtttgaggaagtgaaagccaagcgcggcaagcgcccgacagccttccagttcctgcaagaaatcaagccggaagccgtagcgtacatcaccattaagaccactctggcttgcctaaccagtgcggacaatacaaccgttcaggctgtagcaagcgcaatcggtaaagccattgaggacgaggctcgcttcggtcgtatccgtgaccttgaagctaagcacttcaagaagaacgttgaggaacaactcaacaagcgcgtagggcacgtctacaagaaagcatttatgcaagttgtcgagcacgacatgctctctaagggtctactcgggggcgtggtatggtcgtcgtggcataaggaagactctattcatgtaggagtacgctgcatcgagatgctcattgagtcaaccggaatggttagcttacaccgccaaaatgctggcgtagtaggtcaagactctgagcgtatcgaactcgcacctgaatacgctgaggctatcgcaacccgtgcaggtgcgctggctggcatctctccgatgttccaaccttgcgtagttcctcctaagccgtggactggcattactggtggtggctattgggctgcggggcgcaaacccctgcagttagtacgtactcgcagtctggcggcgcttcgccgctatgaagaagtgtcgatgccggaggtcatcaaagcagtcaacattgcgcagaatacagcatggcgtattaacaagaaagttctcgacgtatctaataccatcacccaatggaaacactgtccagtcgcagatatccctgcgatggatcgtggcgaaatgccagctcgtccgttggacatcgataccaacgagattgcacttaaagcgtggaagaaagaagcttccgcgttctaccgcaaagacaaagcacgcgttagccgtcgtctgtcaatggagtttatgttatctcaggcgaacaagtttgcgaattatgaggcaatctggtttccgtggaacatggattggcgtgggcgcgtgtacgctgtcccgatgttcaatcctcagggcaacgatatgacgaaaggcctgctgacctttgcgcaggagaaacccattggtgaagacggcttctattggctcaagattcatggcgcaaatacagctggagtggataaagtaccgtttccacaacgcatcaaatttgttgaggataaccatacgaatattatggaatgcgcgaaagcaccgctggaaaacacttggtgggcggaacaggactcgccgttctgctttctggcgttctgctttgagtatgctggcgtcatcaatagtggtctgtcgtacaactgtagcttgcctctggcattcgatggtagttgctccggcctgcaacatttctcagcgatgttacgcgacgaaattggcggcaaagctgtgaatctcctcccatctgcggaataccaggatatttatcgtatcgtcagcgacaaagttaacgagatgctgaaacaagatctgattaacggtacctctaccaccgtggaaacggtgactgataagaagacaggcgaaattacccaacgcacgaaatacgggaccaaagttatggcacagtggtggttagaacacggtgtgaatcgtggcgtcacgaaacgctcggttatgactttggtgtatggggcgctggagtttggattccgcgatcaagtgctgagtgacaccattcaaaaagcgatcgataacggcaagggtgacatgtttctgaatccgaatcaggctgctggttacatggcgaaactgatctggaacgcagtgtccgggaccgtagtcgcagcagttgaggcgatgaactggctgaaaagtgcggcgaaattacttgctgctgaagtgaaggatcgtaagacggatacagttctgcgtggccgctgcgcagtacattgggtgactcccgacggcttccctgtgtggcaggaatacaagaagcctattcagacgcgcttgaacctgatgttcctcggtcagttccgcttacagcctaccattaacaccaacaaagatagcgagattgatgcgcgcaaacaggtgtctggtatcgctcctaactttgtacacagcctggacggtaaccaccttcgtatgactgtagtgtgggcacacgagaagtacggaatcgaatcttttgcactgattcacgactccttcggtaccattccggctgacgctgcgaacctgttcaaagcagtgcgcgaaactttcgttgacacatatgagtcttgtgatgtactggctgatttctacgaccagattgctgaccagttgcacgagtctcaacgcgacaaaatgccagcacttccggctaaaggtaacttgaacctccgtgacatcttaaaatcggacttcgcgttcgcg

SEQ ID NO: 1968 - protein, 890 aa, synthetic construct
  REGION 1..890: note = Variant of RNA polymerase
MHHHHHHMNTINIAKNDFSDIELAAIPFNTLADHYGERLAREQLALEHESYEMGEARFRKMFERQLKAGEVADNAAAKPLITTLLPKMIARINDWFEEVKAKRGKRPTAFQFLQEIKPEAVAYITIKTTLACLTSADNTTVQAVASAIGKAIEDEARFGRIRDLEAKHFKKNVEEQLNKRVGHVYKKAFMQVVEHDMLSKGLLGGVVWSSWHKEDSIHVGVRCIEMLIESTGMVSLHRQNAGVVGQDSERIELAPEYAEAIATRAGALAGISPMFQPCVVPPKPWTGITGGGYWAAGRKPLQLVRTRSLAALRRYEEVSMPEVIKAVNIAQNTAWRINKKVLDVSNTITQWKHCPVADIPAMDRGEMPARPLDIDTNEIALKAWKKEASAFYRKDKARVSRRLSMEFMLSQANKFANYEAIWFPWNMDWRGRVYAVPMFNPQGNDMTKGLLTFAQEKPIGEDGFYWLKIHGANTAGVDKVPFPQRIKFVEDNHTNIMECAKAPLENTWWAEQDSPFCFLAFCFEYAGVINSGLSYNCSLPLAFDGSCSGLQHFSAMLRDEIGGKAVNLLPSAEYQDIYRIVSDKVNEMLKQDLINGTSTTVETVTDKKTGEITQRTKYGTKVMAQWWLEHGVNRGVTKRSVMTLVYGALEFGFRDQVLSDTIQKAIDNGKGDMFLNPNQAAGYMAKLIWNAVSGTVVAAVEAMNWLKSAAKLLAAEVKDRKTDTVLRGRCAVHWVTPDGFPVWQEYKKPIQTRLNLMFLGQFRLQPTINTNKDSEIDARKQVSGIAPNFVHSLDGNHLRMTVVWAHEKYGIESFALIHDSFGTIPADAANLFKAVRETFVDTYESCDVLADFYDQIADQLHESQRDKMPALPAKGNLNLRDILKSDFAFA

SEQ ID NO: 1969 - DNA, 2670 bp, synthetic construct
  misc_feature 1..2670: note = Variant of RNA polymerase
  source 1..2670: mol_type = other DNA
atgcaccatcaccatcaccatatgaacacgattaacattgctaagaacgacttctctgacatcgaactggctgctatcccgttcaacactctggctgaccattacggtgagcgtttagctcgcgaacagttggcccttgagcatgagtcttacgagatgggtgaagcacgcttccgcaagatgtttgagcgtcaacttaaagctggtgaggttgcggataacgctgccgccaagcctctcatcactaccctactccctaagatgattgcacgcatcaacgactggtttgaggaagtgaaagccaagcgcggcaagcgcccgacagccttccagttcctgcaagaaatcaagccggaagccgtagcgtacatcaccattaagaccactctggcttgcctaaccagtgcggacaatacaaccgttcaggctgtagcaagcgcaatcggtaaagccattgaggacgaggctcgcttcggtcgtatccgtgaccttgaagctaagcacttcaagaagaacgttgaggaacaactcaacaagcgcgtagggcacgtctacaagaaagcatttatgcaagttgtcgagcacgacatgctctctaagggtctactcgggggcgtggtatggtcgtcgtggcataaggaagactctattcatgtaggagtacgctgcatcgagatgctcattgagtcaaccggaatggttagcttacaccgccaaaatgctggcgtagtaggtcaagactctgagcgtatcgaactcgcacctgaatacgctgaggctatcgcaacccgtgcaggtgcgctggctggcatctctccgatgttccaaccttgcgtagttcctcctaagccgtggactggcattactggtggtggctattgggctgcggggcgcaaacccctgcagttagtacgtactcgcagtctggcggcgcttcgccgctatgaagaagtgtcgatgccggaggtcatcaaagcagtcaacattgcgcagaatacagcatggcgtattaacaagaaagttctcgacgtagcgaataccatcacccaatggaaacactgtccagtcgcagatatccctgcgatggatcgtggcgaaatgccagctcgtccgttggacatcgataccaacgagattgcacttaaagcgtggaagaaagaagcttccgcgttctaccgcaaagacaaagcacgcgttagccgtcgtctgtcaatggagtttatgttatctcaggcgaacaagtttgcgaattatgaggcaatctggtttccgtggaacatggattggcgtgggcgcgtgtacgctgtcccgatgttcaatcctcagggcaacgatatgacgaaaggcctgctgacctttgcgcaggagaaacccattggtgaagacggcttctattggctcaagattcatggcgcaaatacagctggagtgtgtaaagtaccgtttccacaacgcatcaaatttgttgaggataaccatacgaatattatggaatgcgcgaaagcaccgctggaaaacacttggtgggcggaacaggactcgccgttctgctttctggcgttctgctttgagtatgctggcgtcatcaatagtggtctgtcgtacaactgtagcttgcctctggcattcgatggtagttgctccggcctgcaacatttctcagcgatgttacgcgacgaaattggcggcaaagctgtgaatctcctcccatctgcggaataccaggatatttatcgtatcgtcagcgacaaagttaacgagatgctgaaacaagatctgattaacggtacctctaccaccgtggaaacggtgactgataagaagacaggcgaaattacccaacgcacgaaatacgggaccaaagttatggcacagtggtggttagaacacggtgtgaatcgtggcgtcacgaaacgctcggttatgactttggtgtatggggcgctggagtttggattccgcgatcaagtgctgagtgacaccattcaaaaagcgatcgataacggcaagggtgacatgtttctgaatccgaatcaggctgctggttacatggcgaaactgatctggaacgcagtgtccgggaccgtagtcgcagcagttgaggcgatgaactggctgaaaagtgcggcgaaattacttgctgctgaagtgaaggatcgtaagacggatacagttctgcgtggccgctgcgcagtacattgggtgactcccgacggcttccctgtgtggcaggaatacaagaagcctattcagacgcgcttgaacctgatgttcctcggtcagttccgcttacagcctaccattaacaccaacaaagatagcgagattgatgcgcgcaaacaggtgtctggtatcgctcctaactttgtacacagcctggacggtaaccaccttcgtatgactgtagtgtgggcacacgagaagtacggaatcgaatcttttgcactgattcacgactccttcggtaccattccggctgacgctgcgaacctgttcaaagcagtgcgcgaaactttcgttgacacatatgagtcttgtgatgtactggctgatttctacgaccagattgctgaccagttgcacgagtctcaacgcgacaaaatgccagcacttccggctaaaggtaacttgaacctccgtgacatcttaaaatcggacttcgcgttcgcg

SEQ ID NO: 1970 - protein, 890 aa, synthetic construct
  REGION 1..890: note = Variant of RNA polymerase
MHHHHHHMNTINIAKNDFSDIELAAIPFNTLADHYGERLAREQLALEHESYEMGEARFRKMFERQLKAGEVADNAAAKPLITTLLPKMIARINDWFEEVKAKRGKRPTAFQFLQEIKPEAVAYITIKTTLACLTSADNTTVQAVASAIGKAIEDEARFGRIRDLEAKHFKKNVEEQLNKRVGHVYKKAFMQVVEHDMLSKGLLGGVVWSSWHKEDSIHVGVRCIEMLIESTGMVSLHRQNAGVVGQDSERIELAPEYAEAIATRAGALAGISPMFQPCVVPPKPWTGITGGGYWAAGRKPLQLVRTRSLAALRRYEEVSMPEVIKAVNIAQNTAWRINKKVLDVANTITQWKHCPVADIPAMDRGEMPARPLDIDTNEIALKAWKKEASAFYRKDKARVSRRLSMEFMLSQANKFANYEAIWFPWNMDWRGRVYAVPMFNPQGNDMTKGLLTFAQEKPIGEDGFYWLKIHGANTAGVCKVPFPQRIKFVEDNHTNIMECAKAPLENTWWAEQDSPFCFLAFCFEYAGVINSGLSYNCSLPLAFDGSCSGLQHFSAMLRDEIGGKAVNLLPSAEYQDIYRIVSDKVNEMLKQDLINGTSTTVETVTDKKTGEITQRTKYGTKVMAQWWLEHGVNRGVTKRSVMTLVYGALEFGFRDQVLSDTIQKAIDNGKGDMFLNPNQAAGYMAKLIWNAVSGTVVAAVEAMNWLKSAAKLLAAEVKDRKTDTVLRGRCAVHWVTPDGFPVWQEYKKPIQTRLNLMFLGQFRLQPTINTNKDSEIDARKQVSGIAPNFVHSLDGNHLRMTVVWAHEKYGIESFALIHDSFGTIPADAANLFKAVRETFVDTYESCDVLADFYDQIADQLHESQRDKMPALPAKGNLNLRDILKSDFAFA

SEQ ID NO: 1971 - DNA, 2670 bp, synthetic construct
  misc_feature 1..2670: note = Variant of RNA polymerase
  source 1..2670: mol_type = other DNA
atgcaccatcaccatcaccatatgaacacgattaacattgctaagaacgacttctctgacatcgaactggctgctatcccgttcaacactctggctgaccattacggtgagcgtttagctcgcgaacagttggcccttgagcatgagtcttacgagatgggtgaagcacgcttccgcaagatgtttgagcgtcaacttaaagctggtgaggttgcggataacgctgccgccaagcctctcatcactaccctactccctaagatgattgcacgcatcaacgactggtttgaggaagtgaaagccaagcgcggcaagcgcccgacagccttccagttcctgcaagaaatcaagccggaagccgtagcgtacatcaccattaagaccactctggcttgcctaaccagtgcggacaatacaaccgttcaggctgtagcaagcgcaatcggtaaagccattgaggacgaggctcgcttcggtcgtatccgtgaccttgaagctaagcacttcaagaagaacgttgaggaacaactcaacaagcgcgtagggcacgtctacaagaaagcatttatgcaagttgtcgagcacgacatgctctctaagggtctactcgggggcgtggtatggtcgtcgtggcataaggaagactctattcatgtaggagtacgctgcatcgagatgctcattgagtcaaccggaatggttagcttacaccgccaaaatgctggcgtagtaggtcaagactctgagcgtatcgaactcgcacctgaatacgctgaggctatcgcaacccgtgcaggtgcgctggctggcatctctccgatgttccaaccttgcgtagttcctcctaagccgtggactggcattactggtggtggctattgggctgcggggcgcaaacccctgcagttagtacgtactcgcagtctggcggcgcttcgccgctatgaagaagtgtcgatgccggaggtcatcaaagcagtcaacattgcgcagaatacagcatggcgtattaacaagaaagttctcgacgtagcgaataccatcacccaatggaaacactgtccagtcgcagatatccctgcgatggatcgtggcgaaatgccagctcgtccgttggacatcgataccaacgagattgcacttaaagcgtggaagaaagaagcttccgcgttctaccgcaaagacaaagcacgcgttagccgtcgtctgtcaatggagtttatgttatctcaggcgaacaagtttgcgaattatgaggcaatctggtttccgtggaacatggattggcgtgggcgcgtgtacgctgtcccgatgttcaatcctcagggcaacgatatgacgaaaggcctgctgacctttgcgcaggagaaacccattggtgaagacggcttctattggctcaagattcatggcgcaaatacagctggagtggataaagtaccgtttccacaacgcatcaaatttgttgaggataaccatacgaatattatggaatgcgcgaaagcaccgctggaaaacacttggtgggcggaacagtcttcgccgttctgctttctggcgttctgctttgagtatgctggcgtcatcaatagtggtctgtcgtacaactgtagcttgcctctggcattcgatggtagttgctccggcctgcaacatttctcagcgatgttacgcgacgaaattggcggcaaagctgtgaatctcctcccatctgcggaataccaggatatttatcgtatcgtcagcgacaaagttaacgagatgctgaaacaagatctgattaacggtacctctaccaccgtggaaacggtgactgataagaagacaggcgaaattacccaacgcacgaaatacgggaccaaagttatggcacagtggtggttagaacacggtgtgaatcgtggcgtcacgaaacgctcggttatgactttggtgtatggggcgctggagtttggattccgcgatcaagtgctgagtgacaccattcaaaaagcgatcgataacggcaagggtgacatgtttctgaatccgaatcaggctgctggttacatggcgaaactgatctggaacgcagtgtccgggaccgtagtcgcagcagttgaggcgatgaactggctgaaaagtgcggcgaaattacttgctgctgaagtgaaggatcgtaagacggatacagttctgcgtggccgctgcgcagtacattgggtgactcccgacggcttccctgtgtggcaggaatacaagaagcctattcagacgcgcttgaacctgatgttcctcggtcagttccgcttacagcctaccattaacaccaacaaagatagcgagattgatgcgcgcaaacaggtgtctggtatcgctcctaactttgtacacagcctggacggtaaccaccttcgtatgactgtagtgtgggcacacgagaagtacggaatcgaatcttttgcactgattcacgactccttcggtaccattccggctgacgctgcgaacctgttcaaagcagtgcgcgaaactttcgttgacacatatgagtcttgtgatgtactggctgatttctacgaccagattgctgaccagttgcacgagtctcaacgcgacaaaatgccagcacttccggctaaaggtaacttgaacctccgtgacatcttaaaatcggacttcgcgttcgcg

SEQ ID NO: 1972 - protein, 890 aa, synthetic construct
  REGION 1..890: note = Variant of RNA polymerase
MHHHHHHMNTINIAKNDFSDIELAAIPFNTLADHYGERLAREQLALEHESYEMGEARFRKMFERQLKAGEVADNAAAKPLITTLLPKMIARINDWFEEVKAKRGKRPTAFQFLQEIKPEAVAYITIKTTLACLTSADNTTVQAVASAIGKAIEDEARFGRIRDLEAKHFKKNVEEQLNKRVGHVYKKAFMQVVEHDMLSKGLLGGVVWSSWHKEDSIHVGVRCIEMLIESTGMVSLHRQNAGVVGQDSERIELAPEYAEAIATRAGALAGISPMFQPCVVPPKPWTGITGGGYWAAGRKPLQLVRTRSLAALRRYEEVSMPEVIKAVNIAQNTAWRINKKVLDVANTITQWKHCPVADIPAMDRGEMPARPLDIDTNEIALKAWKKEASAFYRKDKARVSRRLSMEFMLSQANKFANYEAIWFPWNMDWRGRVYAVPMFNPQGNDMTKGLLTFAQEKPIGEDGFYWLKIHGANTAGVDKVPFPQRIKFVEDNHTNIMECAKAPLENTWWAEQSSPFCFLAFCFEYAGVINSGLSYNCSLPLAFDGSCSGLQHFSAMLRDEIGGKAVNLLPSAEYQDIYRIVSDKVNEMLKQDLINGTSTTVETVTDKKTGEITQRTKYGTKVMAQWWLEHGVNRGVTKRSVMTLVYGALEFGFRDQVLSDTIQKAIDNGKGDMFLNPNQAAGYMAKLIWNAVSGTVVAAVEAMNWLKSAAKLLAAEVKDRKTDTVLRGRCAVHWVTPDGFPVWQEYKKPIQTRLNLMFLGQFRLQPTINTNKDSEIDARKQVSGIAPNFVHSLDGNHLRMTVVWAHEKYGIESFALIHDSFGTIPADAANLFKAVRETFVDTYESCDVLADFYDQIADQLHESQRDKMPALPAKGNLNLRDILKSDFAFA

SEQ ID NO: 1973 - DNA, 2670 bp, synthetic construct
  misc_feature 1..2670: note = Variant of RNA polymerase
  source 1..2670: mol_type = other DNA
atgcaccatcaccatcaccatatgaacacgattaacattgctaagaacgacttctctgacatcgaactggctgctatcccgttcaacactctggctgaccattacggtgagcgtttagctcgcgaacagttggcccttgagcatgagtcttacgagatgggtgaagcacgcttccgcaagatgtttgagcgtcaacttaaagctggtgaggttgcggataacgctgccgccaagcctctcatcactaccctactccctaagatgattgcacgcatcaacgactggtttgaggaagtgaaagccaagcgcggcaagcgcccgacagccttccagttcctgcaagaaatcaagccggaagccgtagcgtacatcaccattaagaccactctggcttgcctaaccagtgcggacaatacaaccgttcaggctgtagcaagcgcaatcggtaaagccattgaggacgaggctcgcttcggtcgtatccgtgaccttgaagctaagcacttcaagaagaacgttgaggaacaactcaacaagcgcgtagggcacgtctacaagaaagcatttatgcaagttgtcgagcacgacatgctctctaagggtctactcgggggcgtggtatggtcgtcgtggcataaggaagactctattcatgtaggagtacgctgcatcgagatgctcattgagtcaaccggaatggttagcttacaccgccaaaatgctggcgtagtaggtcaagactctgagcgtatcgaactcgcacctgaatacgctgaggctatcgcaacccgtgcaggtgcgctggctggcatctctccgatgttccaaccttgcgtagttcctcctaagccgtggactggcattactggtggtggctattgggctgcggggcgcaaacccctgcagttagtacgtactcgcagtctggcggcgcttcgccgctatgaagaagtgtcgatgccggaggtcatcaaagcagtcaacattgcgcagaatacagcatggcgtattaacaagaaagttctcgacgtagcgaataccatcacccaatggaaacactgtccagtcgcagatatccctgcgatggatcgtggcgaaatgccagctcgtccgttggacatcgataccaacgagattgcacttaaagcgtggaagaaagaagcttccgcgttctaccgcaaagacaaagcacgcgttagccgtcgtctgaggatggagtttatgttatctcaggcgaacaagtttgcgaattatgaggcaatctggtttccgtggaacatggattggcgtgggcgcgtgtacgctgtcccgatgttcaatcctcagggcaacgatatgacgaaaggcctgctgacctttgcgcaggagaaacccattggtgaagacggcttctattggctcaagattcatggcgcaaatacagctggagtggataaagtaccgtttccacaacgcatcaaatttgttgaggataaccatacgaatattatggaatgcgcgaaagcaccgctggaaaacacttggtgggcggaacaggactcgccgttctgctttctggcgttctgctttgagtatgctggcgtcatcaatagtggtctgtcgtacaactgtagcttgcctctggcattcgatggtagttgctccggcctgcaacatttctcagcgatgttacgcgacgaaattggcggcaaagctgtgaatctcctcccatctgcggaataccaggatatttatcgtatcgtcagcgacaaagttaacgagatgctgaaacaagatctgattaacggtacctctaccaccgtggaaacggtgactgataagaagacaggcgaaattacccaacgcacgaaatacgggaccaaagttatggcacagtggtggttagaacacggtgtgaatcgtggcgtcacgaaacgctcggttatgactttggtgtatggggcgctggagtttggattccgcgatcaagtgctgagtgacaccattcaaaaagcgatcgataacggcaagggtgacatgtttctgaatccgaatcaggctgctggttacatggcgaaactgatctggaacgcagtgtccgggaccgtagtcgcagcagttgaggcgatgaactggctgaaaagtgcggcgaaattacttgctgctgaagtgaaggatcgtaagacggatacagttctgcgtggccgctgcgcagtacattgggtgactcccgacggcttccctgtgtggcaggaatacaagaagcctattcagacgcgcttgaacctgatgttcctcggtcagttccgcttacagcctaccattaacaccaacaaagatagcgagattgatgcgcgcaaacaggtgtctggtatcgctcctaactttgtacacagcctggacggtaaccaccttcgtatgactgtagtgtgggcacacgagaagtacggaatcgaatcttttgcactgattcacgactccttcggtaccattccggctgacgctgcgaacctgttcaaagcagtgcgcgaaactttcgttgacacatatgagtcttgtgatgtactggctgatttctacgaccagattgctgaccagttgcacgagtctcaacgcgacaaaatgccagcacttccggctaaaggtaacttgaacctccgtgacatcttaaaatcggacttcgcgttcgcg

SEQ ID NO: 1974 - protein, 890 aa, synthetic construct
  REGION 1..890: note = Variant of RNA polymerase
MHHHHHHMNTINIAKNDFSDIELAAIPFNTLADHYGERLAREQLALEHESYEMGEARFRKMFERQLKAGEVADNAAAKPLITTLLPKMIARINDWFEEVKAKRGKRPTAFQFLQEIKPEAVAYITIKTTLACLTSADNTTVQAVASAIGKAIEDEARFGRIRDLEAKHFKKNVEEQLNKRVGHVYKKAFMQVVEHDMLSKGLLGGVVWSSWHKEDSIHVGVRCIEMLIESTGMVSLHRQNAGVVGQDSERIELAPEYAEAIATRAGALAGISPMFQPCVVPPKPWTGITGGGYWAAGRKPLQLVRTRSLAALRRYEEVSMPEVIKAVNIAQNTAWRINKKVLDVANTITQWKHCPVADIPAMDRGEMPARPLDIDTNEIALKAWKKEASAFYRKDKARVSRRLRMEFMLSQANKFANYEAIWFPWNMDWRGRVYAVPMFNPQGNDMTKGLLTFAQEKPIGEDGFYWLKIHGANTAGVDKVPFPQRIKFVEDNHTNIMECAKAPLENTWWAEQDSPFCFLAFCFEYAGVINSGLSYNCSLPLAFDGSCSGLQHFSAMLRDEIGGKAVNLLPSAEYQDIYRIVSDKVNEMLKQDLINGTSTTVETVTDKKTGEITQRTKYGTKVMAQWWLEHGVNRGVTKRSVMTLVYGALEFGFRDQVLSDTIQKAIDNGKGDMFLNPNQAAGYMAKLIWNAVSGTVVAAVEAMNWLKSAAKLLAAEVKDRKTDTVLRGRCAVHWVTPDGFPVWQEYKKPIQTRLNLMFLGQFRLQPTINTNKDSEIDARKQVSGIAPNFVHSLDGNHLRMTVVWAHEKYGIESFALIHDSFGTIPADAANLFKAVRETFVDTYESCDVLADFYDQIADQLHESQRDKMPALPAKGNLNLRDILKSDFAFA

SEQ ID NO: 1975 - DNA, 2670 bp, synthetic construct
  misc_feature 1..2670: note = Variant of RNA polymerase
  source 1..2670: mol_type = other DNA
atgcaccatcaccatcaccatatgaacacgattaacattgctaagaacgacttctctgacatcgaactggctgctatcccgttcaacactctggctgaccattacggtgagcgtttagctcgcgaacagttggcccttgagcatgagtcttacgagatgggtgaagcacgcttccgcaagatgtttgagcgtcaacttaaagctggtgaggttgcggataacgctgccgccaagcctctcatcactaccctactccctaagatgattgcacgcatcaacgactggtttgaggaagtgaaagccaagcgcggcaagcgcccgacagccttccagttcctgcaagaaatcaagccggaagccgtagcgtacatcaccattaagaccactctggcttgcctaaccagtgcggacaatacaaccgttcaggctgtagcaagcgcaatcggtaaagccattgaggacgaggctcgcttcggtcgtatccgtgaccttgaagctaagcacttcaagaagaacgttgaggaacaactcaacaagcgcgtagggcacgtctacaagaaagcatttatgcaagttgtcgagcacgacatgctctctaagggtctactcgggggcgtggtatggtcgtcgtggcataaggaagactctattcatgtaggagtacgctgcatcgagatgctcattgagtcaaccggaatggttagcttacaccgccaaaatgctggcgtagtaggtcaagactctgagcgtatcgaactcgcacctgaatacgctgaggctatcgcaacccgtgcaggtgcgctggctggcatctctccgatgttccaaccttgcgtagttcctcctaagccgtggactggcattactggtggtggctattgggctgcggggcgcaaacccctgcagttagtacgtactcgcagtctggcggcgcttcgccgctatgaagaagtgtcgatgccggaggtcatcaaagcagtcaacattgcgcagaatacagcatggcgtattaacaagaaagttctcgacgtagcgaataccatcacccaatggaaacactgtccagtcgcagatatccctgcgatggatcgtggcgaaatgccagctcgtccgttggacatcgataccaacgagattgcacttaaagcgtggaagaaagaagcttccgcgttctaccgcaaagacaaagcacgcgttagccgtcgtctgtcaatggagtttatgttatctcaggcgaacaagtttgcgaattatgaggcaatctggtttccgtggaacatggattggcgtgggcgcgtgtacgctgtcccgatgttcaatcctcagggcaacgatatgacgaaaggcctgctgacctttgcgcaggagaaacccattggtgaagacggcttctattggctcaagattcatggcgcaaatacagctggagtggataaagtaccgtttccacaacgcatcaaatttgttgaggataaccatacgaatattatggaatgcgcgaaagcaccgctggaaaacacttggtgggcggaacaggactgtccgttctgctttctggcgttctgctttgagtatgctggcgtcatcaatagtggtctgtcgtacaactgtagcttgcctctggcattcgatggtagttgctccggcctgcaacatttctcagcgatgttacgcgacgaaattggcggcaaagctgtgaatctcctcccatctgcggaataccaggatatttatcgtatcgtcagcgacaaagttaacgagatgctgaaacaagatctgattaacggtacctctaccaccgtggaaacggtgactgataagaagacaggcgaaattacccaacgcacgaaatacgggaccaaagttatggcacagtggtggttagaacacggtgtgaatcgtggcgtcacgaaacgctcggttatgactttggtgtatggggcgctggagtttggattccgcgatcaagtgctgagtgacaccattcaaaaagcgatcgataacggcaagggtgacatgtttctgaatccgaatcaggctgctggttacatggcgaaactgatctggaacgcagtgtccgggaccgtagtcgcagcagttgaggcgatgaactggctgaaaagtgcggcgaaattacttgctgctgaagtgaaggatcgtaagacggatacagttctgcgtggccgctgcgcagtacattgggtgactcccgacggcttccctgtgtggcaggaatacaagaagcctattcagacgcgcttgaacctgatgttcctcggtcagttccgcttacagcctaccattaacaccaacaaagatagcgagattgatgcgcgcaaacaggtgtctggtatcgctcctaactttgtacacagcctggacggtaaccaccttcgtatgactgtagtgtgggcacacgagaagtacggaatcgaatcttttgcactgattcacgactccttcggtaccattccggctgacgctgcgaacctgttcaaagcagtgcgcgaaactttcgttgacacatatgagtcttgtgatgtactggctgatttctacgaccagattgctgaccagttgcacgagtctcaacgcgacaaaatgccagcacttccggctaaaggtaacttgaacctccgtgacatcttaaaatcggacttcgcgttcgcg

SEQ ID NO: 1976 - protein, 890 aa, synthetic construct
  REGION 1..890: note = Variant of RNA polymerase
MHHHHHHMNTINIAKNDFSDIELAAIPFNTLADHYGERLAREQLALEHESYEMGEARFRKMFERQLKAGEVADNAAAKPLITTLLPKMIARINDWFEEVKAKRGKRPTAFQFLQEIKPEAVAYITIKTTLACLTSADNTTVQAVASAIGKAIEDEARFGRIRDLEAKHFKKNVEEQLNKRVGHVYKKAFMQVVEHDMLSKGLLGGVVWSSWHKEDSIHVGVRCIEMLIESTGMVSLHRQNAGVVGQDSERIELAPEYAEAIATRAGALAGISPMFQPCVVPPKPWTGITGGGYWAAGRKPLQLVRTRSLAALRRYEEVSMPEVIKAVNIAQNTAWRINKKVLDVANTITQWKHCPVADIPAMDRGEMPARPLDIDTNEIALKAWKKEASAFYRKDKARVSRRLSMEFMLSQANKFANYEAIWFPWNMDWRGRVYAVPMFNPQGNDMTKGLLTFAQEKPIGEDGFYWLKIHGANTAGVDKVPFPQRIKFVEDNHTNIMECAKAPLENTWWAEQDCPFCFLAFCFEYAGVINSGLSYNCSLPLAFDGSCSGLQHFSAMLRDEIGGKAVNLLPSAEYQDIYRIVSDKVNEMLKQDLINGTSTTVETVTDKKTGEITQRTKYGTKVMAQWWLEHGVNRGVTKRSVMTLVYGALEFGFRDQVLSDTIQKAIDNGKGDMFLNPNQAAGYMAKLIWNAVSGTVVAAVEAMNWLKSAAKLLAAEVKDRKTDTVLRGRCAVHWVTPDGFPVWQEYKKPIQTRLNLMFLGQFRLQPTINTNKDSEIDARKQVSGIAPNFVHSLDGNHLRMTVVWAHEKYGIESFALIHDSFGTIPADAANLFKAVRETFVDTYESCDVLADFYDQIADQLHESQRDKMPALPAKGNLNLRDILKSDFAFA

SEQ ID NO: 1977 - DNA, 2670 bp, synthetic construct
  misc_feature 1..2670: note = Variant of RNA polymerase
  source 1..2670: mol_type = other DNA
atgcaccatcaccatcaccatatgaacacgattaacattgctaagaacgacttctctgacatcgaactggctgctatcccgttcaacactctggctgaccattacggtgagcgtttagctcgcgaacagttggcccttgagcatgagtcttacgagatgggtgaagcacgcttccgcaagatgtttgagcgtcaacttaaagctggtgaggttgcggataacgctgccgccaagcctctcatcactaccctactccctaagatgattgcacgcatcaacgactggtttgaggaagtgaaagccaagcgcggcaagcgcccgacagccttccagttcctgcaagaaatcaagccggaagccgtagcgtacatcaccattaagaccactctggcttgcctaaccagtgcggacaatacaaccgttcaggctgtagcaagcgcaatcggtaaagccattgaggacgaggctcgcttcggtcgtatccgtgaccttgaagctaagcacttcaagaagaacgttgaggaacaactcaacaagcgcgtagggcacgtctacaagaaagcatttatgcaagttgtcgagcacgacatgctctctaagggtctactcgggggcgtggtatggtcgtcgtggcataaggaagactctattcatgtaggagtacgctgcatcgagatgctcattgagtcaaccggaatggttagcttacaccgccaaaatgctggcgtagtaggtcaagactctgagcgtatcgaactcgcacctgaatacgctgaggctatcgcaacccgtgcaggtgcgctggctggcatctctccgatgttccaaccttgcgtagttcctcctaagccgtggactggcattactggtggtggctattgggctgcggggcgcaaacccctgcagttagtacgtactcgcagtctggcggcgcttcgccgctatgaagaagtgtcgatgccggaggtcatcaaagcagtcaacattgcgcagaatacagcatggcgtattaacaagaaagttctcgacgtagcgaataccatcacccaatggaaacactgtccagtcgcagatatccctgcgatggatcgtggcgaaatgccagctcgtccgttggacatcgataccaacgagattgcacttaaagcgtggaagaaagaagcttccgagttctaccgcaaagacaaagcacgcgttagccgtcgtctgtcaatggagtttatgttatctcaggcgaacaagtttgcgaattatgaggcaatctggtttccgtggaacatggattggcgtgggcgcgtgtacgctgtcccgatgttcaatcctcagggcaacgatatgacgaaaggcctgctgacctttgcgcaggagaaacccattggtgaagacggcttctattggctcaagattcatggcgcaaatacagctggagtggataaagtaccgtttccacaacgcatcaaatttgttgaggataaccatacgaatattatggaatgcgcgaaagcaccgctggaaaacacttggtgggcggaacaggactcgccgttctgctttctggcgttctgctttgagtatgctggcgtcatcaatagtggtctgtcgtacaactgtagcttgcctctggcattcgatggtagttgctccggcctgcaacatttctcagcgatgttacgcgacgaaattggcggcaaagctgtgaatctcctcccatctgcggaataccaggatatttatcgtatcgtcagcgacaaagttaacgagatgctgaaacaagatctgattaacggtacctctaccaccgtggaaacggtgactgataagaagacaggcgaaattacccaacgcacgaaatacgggaccaaagttatggcacagtggtggttagaacacggtgtgaatcgtggcgtcacgaaacgctcggttatgactttggtgtatggggcgctggagtttggattccgcgatcaagtgctgagtgacaccattcaaaaagcgatcgataacggcaagggtgacatgtttctgaatccgaatcaggctgctggttacatggcgaaactgatctggaacgcagtgtccgggaccgtagtcgcagcagttgaggcgatgaactggctgaaaagtgcggcgaaattacttgctgctgaagtgaaggatcgtaagacggatacagttctgcgtggccgctgcgcagtacattgggtgactcccgacggcttccctgtgtggcaggaatacaagaagcctattcagacgcgcttgaacctgatgttcctcggtcagttccgcttacagcctaccattaacaccaacaaagatagcgagattgatgcgcgcaaacaggtgtctggtatcgctcctaactttgtacacagcctggacggtaaccaccttcgtatgactgtagtgtgggcacacgagaagtacggaatcgaatcttttgcactgattcacgactccttcggtaccattccggctgacgctgcgaacctgttcaaagcagtgcgcgaaactttcgttgacacatatgagtcttgtgatgtactggctgatttctacgaccagattgctgaccagttgcacgagtctcaacgcgacaaaatgccagcacttccggctaaaggtaacttgaacctccgtgacatcttaaaatcggacttcgcgttcgcg

SEQ ID NO: 1978 - protein, 890 aa, synthetic construct
  REGION 1..890: note = Variant of RNA polymerase
MHHHHHHMNTINIAKNDFSDIELAAIPFNTLADHYGERLAREQLALEHESYEMGEARFRKMFERQLKAGEVADNAAAKPLITTLLPKMIARINDWFEEVKAKRGKRPTAFQFLQEIKPEAVAYITIKTTLACLTSADNTTVQAVASAIGKAIEDEARFGRIRDLEAKHFKKNVEEQLNKRVGHVYKKAFMQVVEHDMLSKGLLGGVVWSSWHKEDSIHVGVRCIEMLIESTGMVSLHRQNAGVVGQDSERIELAPEYAEAIATRAGALAGISPMFQPCVVPPKPWTGITGGGYWAAGRKPLQLVRTRSLAALRRYEEVSMPEVIKAVNIAQNTAWRINKKVLDVANTITQWKHCPVADIPAMDRGEMPARPLDIDTNEIALKAWKKEASEFYRKDKARVSRRLSMEFMLSQANKFANYEAIWFPWNMDWRGRVYAVPMFNPQGNDMTKGLLTFAQEKPIGEDGFYWLKIHGANTAGVDKVPFPQRIKFVEDNHTNIMECAKAPLENTWWAEQDSPFCFLAFCFEYAGVINSGLSYNCSLPLAFDGSCSGLQHFSAMLRDEIGGKAVNLLPSAEYQDIYRIVSDKVNEMLKQDLINGTSTTVETVTDKKTGEITQRTKYGTKVMAQWWLEHGVNRGVTKRSVMTLVYGALEFGFRDQVLSDTIQKAIDNGKGDMFLNPNQAAGYMAKLIWNAVSGTVVAAVEAMNWLKSAAKLLAAEVKDRKTDTVLRGRCAVHWVTPDGFPVWQEYKKPIQTRLNLMFLGQFRLQPTINTNKDSEIDARKQVSGIAPNFVHSLDGNHLRMTVVWAHEKYGIESFALIHDSFGTIPADAANLFKAVRETFVDTYESCDVLADFYDQIADQLHESQRDKMPALPAKGNLNLRDILKSDFAFA

SEQ ID NO: 1979 - DNA, 2670 bp, synthetic construct
  misc_feature 1..2670: note = Variant of RNA polymerase
  source 1..2670: mol_type = other DNA
atgcaccatcaccatcaccatatgaacacgattaacattgctaagaacgacttctctgacatcgaactggctgctatcccgttcaacactctggctgaccattacggtgagcgtttagctcgcgaacagttggcccttgagcatgagtcttacgagatgggtgaagcacgcttccgcaagatgtttgagcgtcaacttaaagctggtgaggttgcggataacgctgccgccaagcctctcatcactaccctactccctaagatgattgcacgcatcaacgactggtttgaggaagtgaaagccaagcgcggcaagcgcccgacagccttccagttcctgcaagaaatcaagccggaagccgtagcgtacatcaccattaagaccactctggcttgcctaaccagtgcggacaatacaaccgttcaggctgtagcaagcgcaatcggtaaagccattgaggacgaggctcgcttcggtcgtatccgtgaccttgaagctaagcacttcaagaagaacgttgaggaacaactcaacaagcgcgtagggcacgtctacaagaaagcatttatgcaagttgtcgagcacgacatgctctctaagggtctactcgggggcgtggtatggtcgtcgtggcataaggaagactctattcatgtaggagtacgctgcatcgagatgctcattgagtcaaccggaatggttagcttacaccgccaaaatgctggcgtagtaggtcaagactctgagcgtatcgaactcgcacctgaatacgctgaggctatcgcaacccgtgcaggtgcgctggctggcatctctccgatgttccaaccttgcgtagttcctcctaagccgtggactggcattactggtggtggctattgggctgcggggcgcaaacccctgcagttagtacgtactcgcagtctggcggcgcttcgccgctatgaagaagtgtcgatgccggaggtcatcaaagcagtcaacattgcgcagaatacagcatggcgtattaacaagaaagttctcgacgtagcgaataccatcacccaatggaaacactgtccagtcgcagatatccctgcgatggatcgtggcgaaatgccagctcgtccgttggacatcgataccaacgagattgcacttaaagcgtggaagaaagaagcttccgcgttctaccgcaaagacaaagcagatgttagccgtcgtctgtcaatggagtttatgttatctcaggcgaacaagtttgcgaattatgaggcaatctggtttccgtggaacatggattggcgtgggcgcgtgtacgctgtcccgatgttcaatcctcagggcaacgatatgacgaaaggcctgctgacctttgcgcaggagaaacccattggtgaagacggcttctattggctcaagattcatggcgcaaatacagctggagtggataaagtaccgtttccacaacgcatcaaatttgttgaggataaccatacgaatattatggaatgcgcgaaagcaccgctggaaaacacttggtgggcggaacaggactcgccgttctgctttctggcgttctgctttgagtatgctggcgtcatcaatagtggtctgtcgtacaactgtagcttgcctctggcattcgatggtagttgctccggcctgcaacatttctcagcgatgttacgcgacgaaattggcggcaaagctgtgaatctcctcccatctgcggaataccaggatatttatcgtatcgtcagcgacaaagttaacgagatgctgaaacaagatctgattaacggtacctctaccaccgtggaaacggtgactgataagaagacaggcgaaattacccaacgcacgaaatacgggaccaaagttatggcacagtggtggttagaacacggtgtgaatcgtggcgtcacgaaacgctcggttatgactttggtgtatggggcgctggagtttggattccgcgatcaagtgctgagtgacaccattcaaaaagcgatcgataacggcaagggtgacatgtttctgaatccgaatcaggctgctggttacatggcgaaactgatctggaacgcagtgtccgggaccgtagtcgcagcagttgaggcgatgaactggctgaaaagtgcggcgaaattacttgctgctgaagtgaaggatcgtaagacggatacagttctgcgtggccgctgcgcagtacattgggtgactcccgacggcttccctgtgtggcaggaatacaagaagcctattcagacgcgcttgaacctgatgttcctcggtcagttccgcttacagcctaccattaacaccaacaaagatagcgagattgatgcgcgcaaacaggtgtctggtatcgctcctaactttgtacacagcctggacggtaaccaccttcgtatgactgtagtgtgggcacacgagaagtacggaatcgaatcttttgcactgattcacgactccttcggtaccattccggctgacgctgcgaacctgttcaaagcagtgcgcgaaactttcgttgacacatatgagtcttgtgatgtactggctgatttctacgaccagattgctgaccagttgcacgagtctcaacgcgacaaaatgccagcacttccggctaaaggtaacttgaacctccgtgacatcttaaaatcggacttcgcgttcgcg

SEQ ID NO: 1980 - protein, 890 aa, synthetic construct
  REGION 1..890: note = Variant of RNA polymerase
MHHHHHHMNTINIAKNDFSDIELAAIPFNTLADHYGERLAREQLALEHESYEMGEARFRKMFERQLKAGEVADNAAAKPLITTLLPKMIARINDWFEEVKAKRGKRPTAFQFLQEIKPEAVAYITIKTTLACLTSADNTTVQAVASAIGKAIEDEARFGRIRDLEAKHFKKNVEEQLNKRVGHVYKKAFMQVVEHDMLSKGLLGGVVWSSWHKEDSIHVGVRCIEMLIESTGMVSLHRQNAGVVGQDSERIELAPEYAEAIATRAGALAGISPMFQPCVVPPKPWTGITGGGYWAAGRKPLQLVRTRSLAALRRYEEVSMPEVIKAVNIAQNTAWRINKKVLDVANTITQWKHCPVADIPAMDRGEMPARPLDIDTNEIALKAWKKEASAFYRKDKADVSRRLSMEFMLSQANKFANYEAIWFPWNMDWRGRVYAVPMFNPQGNDMTKGLLTFAQEKPIGEDGFYWLKIHGANTAGVDKVPFPQRIKFVEDNHTNIMECAKAPLENTWWAEQDSPFCFLAFCFEYAGVINSGLSYNCSLPLAFDGSCSGLQHFSAMLRDEIGGKAVNLLPSAEYQDIYRIVSDKVNEMLKQDLINGTSTTVETVTDKKTGEITQRTKYGTKVMAQWWLEHGVNRGVTKRSVMTLVYGALEFGFRDQVLSDTIQKAIDNGKGDMFLNPNQAAGYMAKLIWNAVSGTVVAAVEAMNWLKSAAKLLAAEVKDRKTDTVLRGRCAVHWVTPDGFPVWQEYKKPIQTRLNLMFLGQFRLQPTINTNKDSEIDARKQVSGIAPNFVHSLDGNHLRMTVVWAHEKYGIESFALIHDSFGTIPADAANLFKAVRETFVDTYESCDVLADFYDQIADQLHESQRDKMPALPAKGNLNLRDILKSDFAFA

SEQ ID NO: 1981 - DNA, 2670 bp, synthetic construct
  misc_feature 1..2670: note = Variant of RNA polymerase
  source 1..2670: mol_type = other DNA
atgcaccatcaccatcaccatatgaacacgattaacattgctaagaacgacttctctgacatcgaactggctgctatcccgttcaacactctggctgaccattacggtgagcgtttagctcgcgaacagttggcccttgagcatgagtcttacgagatgggtgaagcacgcttccgcaagatgtttgagcgtcaacttaaagctggtgaggttgcggataacgctgccgccaagcctctcatcactaccctactccctaagatgattgcacgcatcaacgactggtttgaggaagtgaaagccaagcgcggcaagcgcccgacagccttccagttcctgcaagaaatcaagccggaagccgtagcgtacatcaccattaagaccactctggcttgcctaaccagtgcggacaatacaaccgttcaggctgtagcaagcgcaatcggtaaagccattgaggacgaggctcgcttcggtcgtatccgtgaccttgaagctaagcacttcaagaagaacgttgaggaacaactcaacaagcgcgtagggcacgtctacaagaaagcatttatgcaagttgtcgagcacgacatgctctctaagggtctactcgggggcgtggtatggtcgtcgtggcataaggaagactctattcatgtaggagtacgctgcatcgagatgctcattgagtcaaccggaatggttagcttacaccgccaaaatgctggcgtagtaggtcaagactctgagcgtatcgaactcgcacctgaatacgctgaggctatcgcaacccgtgcaggtgcgctggctggcatctctccgatgttccaaccttgcgtagttcctcctaagccgtggactggcattactggtggtggctattgggctgcggggcgcaaacccctgcagttagtacgtactcgcagtctggcggcgcttcgccgctatgaagaagtgtcgatgccggaggtcatcaaagcagtcaacattgcgcagaatacagcatggcgtattaacaagaaagttctcgacgtagcgaataccatcacccaatggaaacactgtccagtcgcagatatccctgcgatggatcgtggcgaaatgccagctcgtccgttggacatcgataccaacgagattgcacttaaagcgtggaagaaagaagcttccgcgttctaccgcaaagacaaagcacgcgttagccgtcgtctgtcaatggagtttatgttatctcaggcgaacaagtttgcgaattatgaggcaatctggtttccgtggaacatggattggcgtgggcgcgtgtacgctgtcccgatgttcaatcctcagggcaacgatatgacgaaaggcctgctgacctttgcgcaggagaaacccattggtgaagacggcttctattggctcaagattcatggcgcaaatacagctggagtggataaagtaccgtttccacaacgcatcaaatttgttgaggataaccatacgaatattatggaatgcgcgaaagcaccgctggaaaacacttggtgggcggaacaggactcgccgttctgctttctggcgttctgctttgagtatgctggcgtcatcaatagtggtctgtcgtacaactgtagcttgcctctggcattcgatggtagttgctccggcctgcaacatttctcagcgatgttacgcgacgaaattggcggcaaagctgtgaatctcctcccatctgcggaataccaggatatttatcgtatcgtcagcgacaaagttaacgagatgctgaaacaagatctgattaacggtacctctaccaccgtggaaacggtgactgataagaagacaggcgaaattacccaacgcacgaaatacgggaccaaagttatggcacagtggtggttagaacacggtgtgaatcgtggcgtcacgaaacgctcggttatgactttggtgtatggggcgctggagtttggattccgcgatcaagtgctgagtgacaccattcaaaaagcgatcgataacggcaagggtgacatgtttctgaatccgaatcaggctgctggttacatggcgaaactgatctggaacgcagtgtccgggaccgtagtcgcagcagttgaggcgatgaactggctgaaaagtgcggcgaaattacttgcttcggaagtgaaggatcgtaagacggatacagttctgcgtggccgctgcgcagtacattgggtgactcccgacggcttccctgtgtggcaggaatacaagaagcctattcagacgcgcttgaacctgatgttcctcggtcagttccgcttacagcctaccattaacaccaacaaagatagcgagattgatgcgcgcaaacaggtgtctggtatcgctcctaactttgtacacagcctggacggtaaccaccttcgtatgactgtagtgtgggcacacgagaagtacggaatcgaatcttttgcactgattcacgactccttcggtaccattccggctgacgctgcgaacctgttcaaagcagtgcgcgaaactttcgttgacacatatgagtcttgtgatgtactggctgatttctacgaccagattgctgaccagttgcacgagtctcaacgcgacaaaatgccagcacttccggctaaaggtaacttgaacctccgtgacatcttaaaatcggacttcgcgttcgcg

SEQ ID NO: 1982 - protein, 890 aa, synthetic construct
  REGION 1..890: note = Variant of RNA polymerase
MHHHHHHMNTINIAKNDFSDIELAAIPFNTLADHYGERLAREQLALEHESYEMGEARFRKMFERQLKAGEVADNAAAKPLITTLLPKMIARINDWFEEVKAKRGKRPTAFQFLQEIKPEAVAYITIKTTLACLTSADNTTVQAVASAIGKAIEDEARFGRIRDLEAKHFKKNVEEQLNKRVGHVYKKAFMQVVEHDMLSKGLLGGVVWSSWHKEDSIHVGVRCIEMLIESTGMVSLHRQNAGVVGQDSERIELAPEYAEAIATRAGALAGISPMFQPCVVPPKPWTGITGGGYWAAGRKPLQLVRTRSLAALRRYEEVSMPEVIKAVNIAQNTAWRINKKVLDVANTITQWKHCPVADIPAMDRGEMPARPLDIDTNEIALKAWKKEASAFYRKDKARVSRRLSMEFMLSQANKFANYEAIWFPWNMDWRGRVYAVPMFNPQGNDMTKGLLTFAQEKPIGEDGFYWLKIHGANTAGVDKVPFPQRIKFVEDNHTNIMECAKAPLENTWWAEQDSPFCFLAFCFEYAGVINSGLSYNCSLPLAFDGSCSGLQHFSAMLRDEIGGKAVNLLPSAEYQDIYRIVSDKVNEMLKQDLINGTSTTVETVTDKKTGEITQRTKYGTKVMAQWWLEHGVNRGVTKRSVMTLVYGALEFGFRDQVLSDTIQKAIDNGKGDMFLNPNQAAGYMAKLIWNAVSGTVVAAVEAMNWLKSAAKLLASEVKDRKTDTVLRGRCAVHWVTPDGFPVWQEYKKPIQTRLNLMFLGQFRLQPTINTNKDSEIDARKQVSGIAPNFVHSLDGNHLRMTVVWAHEKYGIESFALIHDSFGTIPADAANLFKAVRETFVDTYESCDVLADFYDQIADQLHESQRDKMPALPAKGNLNLRDILKSDFAFA

SEQ ID NO: 1983 - DNA, 2670 bp, synthetic construct
  misc_feature 1..2670: note = Variant of RNA polymerase
  source 1..2670: mol_type = other DNA
atgcaccatcaccatcaccatatgaacacgattaacattgctaagaacgacttctctgacatcgaactggctgctatcccgttcaacactctggctgaccattacggtgagcgtttagctcgcgaacagttggcccttgagcatgagtcttacgagatgggtgaagcacgcttccgcaagatgtttgagcgtcaacttaaagctggtgaggttgcggataacgctgccgccaagcctctcatcactaccctactccctaagatgattgcacgcatcaacgactggtttgaggaagtgaaagccaagcgcggcaagcgcccgacagccttccagttcctgcaagaaatcaagccggaagccgtagcgtacatcaccattaagaccactctggcttgcctaaccagtgcggacaatacaaccgttcaggctgtagcaagcgcaatcggtaaagccattgaggacgaggctcgcttcggtcgtatccgtgaccttgaagctaagcacttcaagaagaacgttgaggaacaactcaacaagcgcgtagggcacgtctacaagaaagcatttatgcaagttgtcgagcacgacatgctctctaagggtctactcgggggcgtggtatggtcgtcgtggcataaggaagactctattcatgtaggagtacgctgcatcgagatgctcattgagtcaaccggaatggttagcttacaccgccaaaatgctggcgtagtaggtcaagactctgagcgtatcgaactcgcacctgaatacgctgaggctatcgcaacccgtgcaggtgcgctggctggcatctctccgatgttccaaccttgcgtagttcctcctaagccgtggactggcattactggtggtggctattgggctgcggggcgcaaacccctgcagttagtacgtactcgcagtctggcggcgcttcgccgctatgaagaagtgtcgatgccggaggtcatcaaagcagtcaacattgcgcagaatacagcatggcgtattaacaagaaagttctcgacgtagcgaataccatcacccaatggaaacactgtccagtcgcagatatccctgcgatggatcgtggcgaaatgccagctcgtccgttggacatcgataccaacgagattgcacttaaagcgtggaagaaagaagcttccgcgttctaccgcaaagacaaagcacgcgttagccgtcgtctgtcaatggagtttatgttatctcaggcgaacaagtttgcgaattatgaggcaatctggtttccgtggaacatggattggcgtgggcgcgtgtacgctgtcccgatgttcaatcctcagggcaacgatatgacgaaaggcctgctgacctttgcgcaggagaaacccattggtgaagacggcttctattggctcaagattcatggcgcaaatacagctggagtggataaagtaccgtttccacaacgcatcaaatttgttgaggataaccatacgaatattatggaatgcgcgaaagcaccgctggaaaacacttggtgggcggaacaggactcgccgttctgctttctggcgttctgctttgagtatgctggcgtcatcaatagtggtctgtcgtacaactgtagcttgcctctggcattcgatggtagttgctccggcctgcaacatttctcagcgatgttacgcgacgaaattggcggcaaagctgtgaatctcctcccatctgcggaataccaggatatttatcgtatcgtcagcgacaaagttaacgagatgctgaaacaagatctgattaacggtacctctaccaccgtggaaacggtgactgataagaagacaggcgaaattacccaacgcacgaaatacgggaccaaagttatggcacagtggtggttagaacacggtgtgaatcgtggcgtcacgaaacgctcggttatgactttggtgtatggggcgctggagtttggattccgcgatcaagtgctgagtgacaccattcaaaaagcgatcgataacggcaagggtgacatgtttctgaatccgaatcaggctgctggttacatggcgaaactgatctggaacgcagtgtccgggaccgtagtcgcagcagttgaggcgatgaactggctgaaaagtgttgcgaaattacttgctgctgaagtgaaggatcgtaagacggatacagttctgcgtggccgctgcgcagtacattgggtgactcccgacggcttccctgtgtggcaggaatacaagaagcctattcagacgcgcttgaacctgatgttcctcggtcagttccgcttacagcctaccattaacaccaacaaagatagcgagattgatgcgcgcaaacaggtgtctggtatcgctcctaactttgtacacagcctggacggtaaccaccttcgtatgactgtagtgtgggcacacgagaagtacggaatcgaatcttttgcactgattcacgactccttcggtaccattccggctgacgctgcgaacctgttcaaagcagtgcgcgaaactttcgttgacacatatgagtcttgtgatgtactggctgatttctacgaccagattgctgaccagttgcacgagtctcaacgcgacaaaatgccagcacttccggctaaaggtaacttgaacctccgtgacatcttaaaatcggacttcgcgttcgcg

SEQ ID NO: 1984 - protein, 890 aa, synthetic construct
  REGION 1..890: note = Variant of RNA polymerase
MHHHHHHMNTINIAKNDFSDIELAAIPFNTLADHYGERLAREQLALEHESYEMGEARFRKMFERQLKAGEVADNAAAKPLITTLLPKMIARINDWFEEVKAKRGKRPTAFQFLQEIKPEAVAYITIKTTLACLTSADNTTVQAVASAIGKAIEDEARFGRIRDLEAKHFKKNVEEQLNKRVGHVYKKAFMQVVEHDMLSKGLLGGVVWSSWHKEDSIHVGVRCIEMLIESTGMVSLHRQNAGVVGQDSERIELAPEYAEAIATRAGALAGISPMFQPCVVPPKPWTGITGGGYWAAGRKPLQLVRTRSLAALRRYEEVSMPEVIKAVNIAQNTAWRINKKVLDVANTITQWKHCPVADIPAMDRGEMPARPLDIDTNEIALKAWKKEASAFYRKDKARVSRRLSMEFMLSQANKFANYEAIWFPWNMDWRGRVYAVPMFNPQGNDMTKGLLTFAQEKPIGEDGFYWLKIHGANTAGVDKVPFPQRIKFVEDNHTNIMECAKAPLENTWWAEQDSPFCFLAFCFEYAGVINSGLSYNCSLPLAFDGSCSGLQHFSAMLRDEIGGKAVNLLPSAEYQDIYRIVSDKVNEMLKQDLINGTSTTVETVTDKKTGEITQRTKYGTKVMAQWWLEHGVNRGVTKRSVMTLVYGALEFGFRDQVLSDTIQKAIDNGKGDMFLNPNQAAGYMAKLIWNAVSGTVVAAVEAMNWLKSVAKLLAAEVKDRKTDTVLRGRCAVHWVTPDGFPVWQEYKKPIQTRLNLMFLGQFRLQPTINTNKDSEIDARKQVSGIAPNFVHSLDGNHLRMTVVWAHEKYGIESFALIHDSFGTIPADAANLFKAVRETFVDTYESCDVLADFYDQIADQLHESQRDKMPALPAKGNLNLRDILKSDFAFA

SEQ ID NO: 1985 - DNA, 2670 bp, synthetic construct
  misc_feature 1..2670: note = Variant of RNA polymerase
  source 1..2670: mol_type = other DNA
atgcaccatcaccatcaccatatgaacacgattaacattgctaagaacgacttctctgacatcgaactggctgctatcccgttcaacactctggctgaccattacggtgagcgtttagctcgcgaacagttggcccttgagcatgagtcttacgagatgggtgaagcacgcttccgcaagatgtttgagcgtcaacttaaagctggtgaggttgcggataacgctgccgccaagcctctcatcactaccctactccctaagatgattgcacgcatcaacgactggtttgaggaagtgaaagccaagcgcggcaagcgcccgacagccttccagttcctgcaagaaatcaagccggaagccgtagcgtacatcaccattaagaccactctggcttgcctaaccagtgcggacaatacaaccgttcaggctgtagcaagcgcaatcggtaaagccattgaggacgaggctcgcttcggtcgtatccgtgaccttgaagctaagcacttcaagaagaacgttgaggaacaactcaacaagcgcgtagggcacgtctacaagaaagcatttatgcaagttgtcgagcacgacatgctctctaagggtctactcgggggcgtggtatggtcgtcgtggcataaggaagactctattcatgtaggagtacgctgcatcgagatgctcattgagtcaaccggaatggttagcttacaccgccaaaatgctggcgtagtaggtcaagactctgagcgtatcgaactcgcacctgaatacgctgaggctatcgcaacccgtgcaggtgcgctggctggcatctctccgatgttccaaccttgcgtagttcctcctaagccgtggactggcattactggtggtggctattgggctgcggggcgcaaacccctgcagttagtacgtactcgcagtctggcggcgcttcgccgctatgaagaagtgtcgatgccggaggtcatcaaagcagtcaacattgcgcagaatacagcatggcgtattaacaagaaagttctcgacgtagcgaataccatcacccaatggaaacactgtccagtcgcagatatccctgcgatggatcgtggcgaaatgccagctcgtccgttggacatcgataccaacgagattgcacttaaagcgtggaagaaagaagcttccgcgttctaccgcaaagacaaagcacgcattagccgtcgtctgtcaatggagtttatgttatctcaggcgaacaagtttgcgaattatgaggcaatctggtttccgtggaacatggattggcgtgggcgcgtgtacgctgtcccgatgttcaatcctcagggcaacgatatgactaaaggcctgctgacctttgcgcaggagaaacccattggtgaagacggcttctattggctcaagattcatggcgcaaatacagctggagtggataaagtaccgtttccacaacgcatcaaatttgttgaggataaccatacgaatattatggaatgcgcgaaagcaccgctggaaaacacttggtgggcggaacaggactcgccgttctgctttctggcgttctgctttgagtatgctggcgtcatcaatagtggtctgtcgtacaactgtagcttgcctctggcattcgatggtagttgctccggcctgcaacatttctcagcgatgttacgcgacgaaattggcggcaaagctgtgaatctcctcccatctgcggaataccaggatatttatcgtatcgtcagcgacaaagttaacgagatgctgaaacaagatctgattaacggtacctctaccaccgtggaaacggtgactgataagaagacaggcgaaattacccaacgcacgaaatacgggaccaaagttatggcacagtggtggttagaacacggtgtgaatcgtggcgtcacgaaacgctcggttatgactttggtgtatggggcgctggagtttggattccgcgatcaagtgctgagtgacaccattcaaaaagcgatcgataacggcaagggtgacatgtttctgaatccgaatcaggctgctggttacatggcgaaactgatctggaacgcagtgtccgggaccgtagtcgcagcagttgaggcgatgaactggctgaaaagtgcggcgaaattacttgctgctgaagtgaaggatcgtaagacggatacagttctgcgtggccgctgcgcagtacattgggtgactcccgacggcttccctgtgtggcaggaatacaagaagcctattcagacgcgcttgaacctgatgttcctcggtcagttccgcttacagcctaccattaacaccaacaaagatagcgagattgatgcgcgcaaacaggtgtctggtatcgctcctaactttgtacacagcctggacggtaaccaccttcgtatgactgtagtgtgggcacacgagaagtacggaatcgaatcttttgcactgattcacgactccttcggtaccattccggctgacgctgcgaacctgttcaaagcagtgcgcgaaactttcgttgacacatatgagtcttgtgatgtactggctgatttctacgaccagattgctgaccagttgcacgagtctcaacgcgacaaaatgccagcacttccggctaaaggtaacttgaacctccgtgacatcttaaaatcggacttcgcgttcgcg

SEQ ID NO: 1986 - protein, 890 aa, synthetic construct
  REGION 1..890: note = Variant of RNA polymerase
MHHHHHHMNTINIAKNDFSDIELAAIPFNTLADHYGERLAREQLALEHESYEMGEARFRKMFERQLKAGEVADNAAAKPLITTLLPKMIARINDWFEEVKAKRGKRPTAFQFLQEIKPEAVAYITIKTTLACLTSADNTTVQAVASAIGKAIEDEARFGRIRDLEAKHFKKNVEEQLNKRVGHVYKKAFMQVVEHDMLSKGLLGGVVWSSWHKEDSIHVGVRCIEMLIESTGMVSLHRQNAGVVGQDSERIELAPEYAEAIATRAGALAGISPMFQPCVVPPKPWTGITGGGYWAAGRKPLQLVRTRSLAALRRYEEVSMPEVIKAVNIAQNTAWRINKKVLDVANTITQWKHCPVADIPAMDRGEMPARPLDIDTNEIALKAWKKEASAFYRKDKARISRRLSMEFMLSQANKFANYEAIWFPWNMDWRGRVYAVPMFNPQGNDMTKGLLTFAQEKPIGEDGFYWLKIHGANTAGVDKVPFPQRIKFVEDNHTNIMECAKAPLENTWWAEQDSPFCFLAFCFEYAGVINSGLSYNCSLPLAFDGSCSGLQHFSAMLRDEIGGKAVNLLPSAEYQDIYRIVSDKVNEMLKQDLINGTSTTVETVTDKKTGEITQRTKYGTKVMAQWWLEHGVNRGVTKRSVMTLVYGALEFGFRDQVLSDTIQKAIDNGKGDMFLNPNQAAGYMAKLIWNAVSGTVVAAVEAMNWLKSAAKLLAAEVKDRKTDTVLRGRCAVHWVTPDGFPVWQEYKKPIQTRLNLMFLGQFRLQPTINTNKDSEIDARKQVSGIAPNFVHSLDGNHLRMTVVWAHEKYGIESFALIHDSFGTIPADAANLFKAVRETFVDTYESCDVLADFYDQIADQLHESQRDKMPALPAKGNLNLRDILKSDFAFA

SEQ ID NO: 1987 - DNA, 2670 bp, synthetic construct
  misc_feature 1..2670: note = Variant of RNA polymerase
  source 1..2670: mol_type = other DNA
atgcaccatcaccatcaccatatgaacacgattaacattgctaagaacgacttctctgacatcgaactggctgctatcccgttcaacactctggctgaccattacggtgagcgtttagctcgcgaacagttggcccttgagcatgagtcttacgagatgggtgaagcacgcttccgcaagatgtttgagcgtcaacttaaagctggtgaggttgcggataacgctgccgccaagcctctcatcactaccctactccctaagatgattgcacgcatcaacgactggtttgaggaagtgaaagccaagcgcggcaagcgcccgacagccttccagttcctgcaagaaatcaagccggaagccgtagcgtacatcaccattaagaccactctggcttgcctaaccagtgcggacaatacaaccgttcaggctgtagcaagcgcaatcggtaaagccattgaggacgaggctcgcttcggtcgtatccgtgaccttgaagctaagcacttcaagaagaacgttgaggaacaactcaacaagcgcgtagggcacgtctacaagaaagcatttatgcaagttgtcgagcacgacatgctctctaagggtctactcgggggcgtggtatggtcgtcgtggcataaggaagactctattcatgtaggagtacgctgcatcgagatgctcattgagtcaaccggaatggttagcttacaccgccaaaatgctggcgtagtaggtcaagactctgagcgtatcgaactcgcacctgaatacgctgaggctatcgcaacccgtgcaggtgcgctggctggcatctctccgatgttccaaccttgcgtagttcctcctaagccgtggactggcattactggtggtggctattgggctgcggggcgcaaacccctgcagttagtacgtactcgcagtctggcggcgcttcgccgctatgaagaagtgtcgatgccggaggtcatcaaagcaattaacattgcgcagaatacagcatggcgtattaacaagaaagttctcgacgtagcgaataccatcacccaatggaaacactgtccagtcgcagatatccctgcgatggatcgtggcgaaatgccagctcgtccgttggacatcgataccaacgagattgcacttaaagcgtggaagaaagaagcttccgcgttctaccgcaaagacaaagcacgcgttagccgtcgtctgtcaatggagtttatgttatctcaggcgaacaagtttgcgaattatgaggcaatctggtttccgtggaacatggattggcgtgggcgcgtgtacgctgtcccgatgttcaatcctcagggcaacgatatgacgaaaggcctgctgacctttgcgcaggagaaacccattggtgaagacggcttctattggctcaagattcatggcgcaaatacagctggagtggataaagtaccgtttccacaacgcatcaaatttgttgaggataaccatacgaatattatggaatgcgcgaaagcaccgctggaaaacacttggtgggcggaacaggactcgccgttctgctttctggcgttctgctttgagtatgctggcgtcatcaatagtggtctgtcgtacaactgtagcttgcctctggcattcgatggtagttgctccggcctgcaacatttctcagcgatgttacgcgacgaaattggcggcaaagctgtgaatctcctcccatctgcggaataccaggatatttatcgtatcgtcagcgacaaagttaacgagatgctgaaacaagatctgattaacggtacctctaccaccgtggaaacggtgactgataagaagacaggcgaaattacccaacgcacgaaatacgggaccaaagttatggcacagtggtggttagaacacggtgtgaatcgtggcgtcacgaaacgctcggttatgactttggtgtatggggcgctggagtttggattccgcgatcaagtgctgagtgacaccattcaaaaagcgatcgataacggcaagggtgacatgtttctgaatccgaatcaggctgctggttacatggcgaaactgatctggaacgcagtgtccgggaccgtagtcgcagcagttgaggcgatgaactggctgaaaagtgcggcgaaattacttgctgctgaagtgaaggatcgtaagacggatacagttctgcgtggccgctgcgcagtacattgggtgactcccgacggcttccctgtgtggcaggaatacaagaagcctattcagacgcgcttgaacctgatgttcctcggtcagttccgcttacagcctaccattaacaccaacaaagatagcgagattgatgcgcgcaaacaggtgtctggtatcgctcctaactttgtacacagcctggacggtaaccaccttcgtatgactgtagtgtgggcacacgagaagtacggaatcgaatcttttgcactgattcacgactccttcggtaccattccggctgacgctgcgaacctgttcaaagcagtgcgcgaaactttcgttgacacatatgagtcttgtgatgtactggctgatttctacgaccagattgctgaccagttgcacgagtctcaacgcgacaaaatgccagcacttccggctaaaggtaacttgaacctccgtgacatcttaaaatcggacttcgcgttcgcg

SEQ ID NO: 1988 - protein, 890 aa, synthetic construct
  REGION 1..890: note = Variant of RNA polymerase
MHHHHHHMNTINIAKNDFSDIELAAIPFNTLADHYGERLAREQLALEHESYEMGEARFRKMFERQLKAGEVADNAAAKPLITTLLPKMIARINDWFEEVKAKRGKRPTAFQFLQEIKPEAVAYITIKTTLACLTSADNTTVQAVASAIGKAIEDEARFGRIRDLEAKHFKKNVEEQLNKRVGHVYKKAFMQVVEHDMLSKGLLGGVVWSSWHKEDSIHVGVRCIEMLIESTGMVSLHRQNAGVVGQDSERIELAPEYAEAIATRAGALAGISPMFQPCVVPPKPWTGITGGGYWAAGRKPLQLVRTRSLAALRRYEEVSMPEVIKAINIAQNTAWRINKKVLDVANTITQWKHCPVADIPAMDRGEMPARPLDIDTNEIALKAWKKEASAFYRKDKARVSRRLSMEFMLSQANKFANYEAIWFPWNMDWRGRVYAVPMFNPQGNDMTKGLLTFAQEKPIGEDGFYWLKIHGANTAGVDKVPFPQRIKFVEDNHTNIMECAKAPLENTWWAEQDSPFCFLAFCFEYAGVINSGLSYNCSLPLAFDGSCSGLQHFSAMLRDEIGGKAVNLLPSAEYQDIYRIVSDKVNEMLKQDLINGTSTTVETVTDKKTGEITQRTKYGTKVMAQWWLEHGVNRGVTKRSVMTLVYGALEFGFRDQVLSDTIQKAIDNGKGDMFLNPNQAAGYMAKLIWNAVSGTVVAAVEAMNWLKSAAKLLAAEVKDRKTDTVLRGRCAVHWVTPDGFPVWQEYKKPIQTRLNLMFLGQFRLQPTINTNKDSEIDARKQVSGIAPNFVHSLDGNHLRMTVVWAHEKYGIESFALIHDSFGTIPADAANLFKAVRETFVDTYESCDVLADFYDQIADQLHESQRDKMPALPAKGNLNLRDILKSDFAFA

SEQ ID NO: 1989 - DNA, 2670 bp, synthetic construct
  misc_feature 1..2670: note = Variant of RNA polymerase
  source 1..2670: mol_type = other DNA
atgcaccatcaccatcaccatatgaacacgattaacattgctaagaacgacttctctgacatcgaactggctgctatcccgttcaacactctggctgaccattacggtgagcgtttagctcgcgaacagttggcccttgagcatgagtcttacgagatgggtgaagcacgcttccgcaagatgtttgagcgtcaacttaaagctggtgaggttgcggataacgctgccgccaagcctctcatcactaccctactccctaagatgattgcacgcatcaacgactggtttgaggaagtgaaagccaagcgcggcaagcgcccgacagccttccagttcctgcaagaaatcaagccggaagccgtagcgtacatcaccattaagaccactctggcttgcctaaccagtgcggacaatacaaccgttcaggctgtagcaagcgcaatcggtaaagccattgaggacgaggctcgcttcggtcgtatccgtgaccttgaagctaagcacttcaagaagaacgttgaggaacaactcaacaagcgcgtagggcacgtctacaagaaagcatttatgcaagttgtcgagcacgacatgctctctaagggtctactcgggggcgtggtatggtcgtcgtggcataaggaagactctattcatgtaggagtacgctgcatcgagatgctcattgagtcaaccggaatggttagcttacaccgccaaaatgctggcgtagtaggtcaagactctgagcgtatcgaactcgcacctgaatacgctgaggctatcgcaacccgtgcaggtgcgctggctggcatctctccgatgttccaaccttgcgtagttcctcctaagccgtggactggcattactggtggtggctattgggctgcggggcgcaaacccctgcagttagtacgtactcgcagtctggcggcgcttcgccgctatgaagaagtgtcgatgccggaggtcatcaaagcagtcaacattgcgcagaatacagcatggcgtattaacaagaaagttctcgacgtagcgaataccatcacccaatggaaacactgtccagtcgcagatatccctgcgatggatcgtggcgaaatgccagctcgtccgttggacatcgataccaacgagattgcacttaaagcgtggaagaaagaagcttccgcgttctaccgcaaagacaaagcacgcgttagccgtcgtctgtcaatggagtttatgttatctcaggcgaacaagtttgcgaattatgaggcaatctggtttccgtggaacatggattggcgtgggcgcgtgtacgctgtcccgtttttcaatcctcagggcaacgatatgacgaaaggcctgctgacctttgcgcaggagaaacccattggtgaagacggcttctattggctcaagattcatggcgcaaatacagctggagtggataaagtaccgtttccacaacgcatcaaatttgttgaggataaccatacgaatattatggaatgcgcgaaagcaccgctggaaaacacttggtgggcggaacaggactcgccgttctgctttctggcgttctgctttgagtatgctggcgtcatcaatagtggtctgtcgtacaactgtagcttgcctctggcattcgatggtagttgctccggcctgcaacatttctcagcgatgttacgcgacgaaattggcggcaaagctgtgaatctcctcccatctgcggaataccaggatatttatcgtatcgtcagcgacaaagttaacgagatgctgaaacaagatctgattaacggtacctctaccaccgtggaaacggtgactgataagaagacaggcgaaattacccaacgcacgaaatacgggaccaaagttatggcacagtggtggttagaacacggtgtgaatcgtggcgtcacgaaacgctcggttatgactttggtgtatggggcgctggagtttggattccgcgatcaagtgctgagtgacaccattcaaaaagcgatcgataacggcaagggtgacatgtttctgaatccgaatcaggctgctggttacatggcgaaactgatctggaacgcagtgtccgggaccgtagtcgcagcagttgaggcgatgaactggctgaaaagtgcggcgaaattacttgctgctgaagtgaaggatcgtaagacggatacagttctgcgtggccgctgcgcagtacattgggtgactcccgacggcttccctgtgtggcaggaatacaagaagcctattcagacgcgcttgaacctgatgttcctcggtcagttccgcttacagcctaccattaacaccaacaaagatagcgagattgatgcgcgcaaacaggtgtctggtatcgctcctaactttgtacacagcctggacggtaaccaccttcgtatgactgtagtgtgggcacacgagaagtacggaatcgaatcttttgcactgattcacgactccttcggtaccattccggctgacgctgcgaacctgttcaaagcagtgcgcgaaactttcgttgacacatatgagtcttgtgatgtactggctgatttctacgaccagattgctgaccagttgcacgagtctcaacgcgacaaaatgccagcacttccggctaaaggtaacttgaacctccgtgacatcttaaaatcggacttcgcgttcgcg

SEQ ID NO: 1990 - protein, 890 aa, synthetic construct
  REGION 1..890: note = Variant of RNA polymerase
MHHHHHHMNTINIAKNDFSDIELAAIPFNTLADHYGERLAREQLALEHESYEMGEARFRKMFERQLKAGEVADNAAAKPLITTLLPKMIARINDWFEEVKAKRGKRPTAFQFLQEIKPEAVAYITIKTTLACLTSADNTTVQAVASAIGKAIEDEARFGRIRDLEAKHFKKNVEEQLNKRVGHVYKKAFMQVVEHDMLSKGLLGGVVWSSWHKEDSIHVGVRCIEMLIESTGMVSLHRQNAGVVGQDSERIELAPEYAEAIATRAGALAGISPMFQPCVVPPKPWTGITGGGYWAAGRKPLQLVRTRSLAALRRYEEVSMPEVIKAVNIAQNTAWRINKKVLDVANTITQWKHCPVADIPAMDRGEMPARPLDIDTNEIALKAWKKEASAFYRKDKARVSRRLSMEFMLSQANKFANYEAIWFPWNMDWRGRVYAVPFFNPQGNDMTKGLLTFAQEKPIGEDGFYWLKIHGANTAGVDKVPFPQRIKFVEDNHTNIMECAKAPLENTWWAEQDSPFCFLAFCFEYAGVINSGLSYNCSLPLAFDGSCSGLQHFSAMLRDEIGGKAVNLLPSAEYQDIYRIVSDKVNEMLKQDLINGTSTTVETVTDKKTGEITQRTKYGTKVMAQWWLEHGVNRGVTKRSVMTLVYGALEFGFRDQVLSDTIQKAIDNGKGDMFLNPNQAAGYMAKLIWNAVSGTVVAAVEAMNWLKSAAKLLAAEVKDRKTDTVLRGRCAVHWVTPDGFPVWQEYKKPIQTRLNLMFLGQFRLQPTINTNKDSEIDARKQVSGIAPNFVHSLDGNHLRMTVVWAHEKYGIESFALIHDSFGTIPADAANLFKAVRETFVDTYESCDVLADFYDQIADQLHESQRDKMPALPAKGNLNLRDILKSDFAFA

SEQ ID NO: 1991 - DNA, 2670 bp, synthetic construct
  misc_feature 1..2670: note = Variant of RNA polymerase
  source 1..2670: mol_type = other DNA
atgcaccatcaccatcaccatatgaacacgattaacattgctaagaacgacttctctgacatcgaactggctgctatcccgttcaacactctggctgaccattacggtgagcgtttagctcgcgaacagttggcccttgagcatgagtcttacgagatgggtgaagcacgcttccgcaagatgtttgagcgtcaacttaaagctggtgaggttgcggataacgctgccgccaagcctctcatcactaccctactccctaagatgattgcacgcatcaacgactggtttgaggaagtgaaagccaagcgcggcaagcgcccgacagccttccagttcctgcaagaaatcaagccggaagccgtagcgtacatcaccattaagaccactctggcttgcctaaccagtgcggacaatacaaccgttcaggctgtagcaagcgcaatcggtaaagccattgaggacgaggctcgcttcggtcgtatccgtgaccttgaagctaagcacttcaagaagaacgttgaggaacaactcaacaagcgcgtagggcacgtctacaagaaagcatttatgcaagttgtcgagcacgacatgctctctaagggtctactcgggggcgtggtatggtcgtcgtggcataaggaagactctattcatgtaggagtacgctgcatcgagatgctcattgagtcaaccggaatggttagcttacaccgccaaaatgctggcgtagtaggtcaagactctgagcgtatcgaactcgcacctgaatacgctgaggctatcgcaacccgtgcaggtgcgctggctggcatctctccgatgttccaaccttgcgtagttcctcctaagccgtggactggcattactggtggtggctattgggctgcggggcgcaaacccctgcagttagtacgtactcgcagtctggcggcgcttcgccgctatgaagaagtgtcgatgccggaggtcatcaaagcagtcaacattgcgcagaatacagcatggcgtattaacaagaaagttctcgacgtagcgaataccatcacccaatggaaacactgtccagtcgcagatatccctgcgatggatcgtggcgaaatgccagctcgtccgttggacatcgataccaacgagattgcacttaaagcgtggaagaaagaagcttccgcgttctaccgcaaagacaaagcacgcgttagccgtcgtctgtcaatggagtttatgttagggcaggcgaacaagtttgcgaattatgaggcaatctggtttccgtggaacatggattggcgtgggcgcgtgtacgctgtcccgatgttcaatcctcagggcaacgatatgacgaaaggcctgctgacctttgcgcaggagaaacccattggtgaagacggcttctattggctcaagattcatggcgcaaatacagctggagtggataaagtaccgtttccacaacgcatcaaatttgttgaggataaccatacgaatattatggaatgcgcgaaagcaccgctggaaaacacttggtgggcggaacaggactcgccgttctgctttctggcgttctgctttgagtatgctggcgtcatcaatagtggtctgtcgtacaactgtagcttgcctctggcattcgatggtagttgctccggcctgcaacatttctcagcgatgttacgcgacgaaattggcggcaaagctgtgaatctcctcccatctgcggaataccaggatatttatcgtatcgtcagcgacaaagttaacgagatgctgaaacaagatctgattaacggtacctctaccaccgtggaaacggtgactgataagaagacaggcgaaattacccaacgcacgaaatacgggaccaaagttatggcacagtggtggttagaacacggtgtgaatcgtggcgtcacgaaacgctcggttatgactttggtgtatggggcgctggagtttggattccgcgatcaagtgctgagtgacaccattcaaaaagcgatcgataacggcaagggtgacatgtttctgaatccgaatcaggctgctggttacatggcgaaactgatctggaacgcagtgtccgggaccgtagtcgcagcagttgaggcgatgaactggctgaaaagtgcggcgaaattacttgctgctgaagtgaaggatcgtaagacggatacagttctgcgtggccgctgcgcagtacattgggtgactcccgacggcttccctgtgtggcaggaatacaagaagcctattcagacgcgcttgaacctgatgttcctcggtcagttccgcttacagcctaccattaacaccaacaaagatagcgagattgatgcgcgcaaacaggtgtctggtatcgctcctaactttgtacacagcctggacggtaaccaccttcgtatgactgtagtgtgggcacacgagaagtacggaatcgaatcttttgcactgattcacgactccttcggtaccattccggctgacgctgcgaacctgttcaaagcagtgcgcgaaactttcgttgacacatatgagtcttgtgatgtactggctgatttctacgaccagattgctgaccagttgcacgagtctcaacgcgacaaaatgccagcacttccggctaaaggtaacttgaacctccgtgacatcttaaaatcggacttcgcgttcgcg

SEQ ID NO: 1992 - protein, 890 aa, synthetic construct
  REGION 1..890: note = Variant of RNA polymerase
MHHHHHHMNTINIAKNDFSDIELAAIPFNTLADHYGERLAREQLALEHESYEMGEARFRKMFERQLKAGEVADNAAAKPLITTLLPKMIARINDWFEEVKAKRGKRPTAFQFLQEIKPEAVAYITIKTTLACLTSADNTTVQAVASAIGKAIEDEARFGRIRDLEAKHFKKNVEEQLNKRVGHVYKKAFMQVVEHDMLSKGLLGGVVWSSWHKEDSIHVGVRCIEMLIESTGMVSLHRQNAGVVGQDSERIELAPEYAEAIATRAGALAGISPMFQPCVVPPKPWTGITGGGYWAAGRKPLQLVRTRSLAALRRYEEVSMPEVIKAVNIAQNTAWRINKKVLDVANTITQWKHCPVADIPAMDRGEMPARPLDIDTNEIALKAWKKEASAFYRKDKARVSRRLSMEFMLGQANKFANYEAIWFPWNMDWRGRVYAVPMFNPQGNDMTKGLLTFAQEKPIGEDGFYWLKIHGANTAGVDKVPFPQRIKFVEDNHTNIMECAKAPLENTWWAEQDSPFCFLAFCFEYAGVINSGLSYNCSLPLAFDGSCSGLQHFSAMLRDEIGGKAVNLLPSAEYQDIYRIVSDKVNEMLKQDLINGTSTTVETVTDKKTGEITQRTKYGTKVMAQWWLEHGVNRGVTKRSVMTLVYGALEFGFRDQVLSDTIQKAIDNGKGDMFLNPNQAAGYMAKLIWNAVSGTVVAAVEAMNWLKSAAKLLAAEVKDRKTDTVLRGRCAVHWVTPDGFPVWQEYKKPIQTRLNLMFLGQFRLQPTINTNKDSEIDARKQVSGIAPNFVHSLDGNHLRMTVVWAHEKYGIESFALIHDSFGTIPADAANLFKAVRETFVDTYESCDVLADFYDQIADQLHESQRDKMPALPAKGNLNLRDILKSDFAFA

SEQ ID NO: 1993 - DNA, 2670 bp, synthetic construct
  misc_feature 1..2670: note = Variant of RNA polymerase
  source 1..2670: mol_type = other DNA
atgcaccatcaccatcaccatatgaacacgattaacattgctaagaacgacttctctgacatcgaactggctgctatcccgttcaacactctggctgaccattacggtgagcgtttagctcgcgaacagttggcccttgagcatgagtcttacgagatgggtgaagcacgcttccgcaagatgtttgagcgtcaacttaaagctggtgaggttgcggataacgctgccgccaagcctctcatcactaccctactccctaagatgattgcacgcatcaacgactggtttgaggaagtgaaagccaagcgcggcaagcgcccgacagccttccagttcctgcaagaaatcaagccggaagccgtagcgtacatcaccattaagaccactctggcttgcctaaccagtgcggacaatacaaccgttcaggctgtagcaagcgcaatcggtaaagccattgaggacgaggctcgcttcggtcgtatccgtgaccttgaagctaagcacttcaagaagaacgttgaggaacaactcaacaagcgcgtagggcacgtctacaagaaagcatttatgcaagttgtcgagcacgacatgctctctaagggtctactcgggggcgtggtatggtcgtcgtggcataaggaagactctattcatgtaggagtacgctgcatcgagatgctcattgagtcaaccggaatggttagcttacaccgccaaaatgctggcgtagtaggtcaagactctgagcgtatcgaactcgcacctgaatacgctgaggctatcgcaacccgtgcaggtgcgctggctggcatctctccgatgttccaaccttgcgtagttcctcctaagccgtggactggcattactggtggtggctattgggctgcggggcgcaaacccctgcagttagtacgtactcgcagtctggcggcgcttcgccgctatgaagaagtgtcgatgccggaggtcatcaaagcagtcaacattgcgcagaatacagcatggcgtattaacaagaaagttctcgacgtagcgaataccatcacccaatggaaacactgtccagtcgcagatatccctgcgatggatcgtggcgaaatgccagctcgtccgttggacatcgataccaacgagattgcacttaaagcgtggaagaaagaagcttccgcgttctaccgcaaagactctgcacgcgttagccgtcgtctgtcaatggagtttatgttatctcaggcgaacaagtttgcgaattatgaggcaatctggtttccgtggaacatggattggcgtgggcgcgtgtacgctgtcccgatgttcaatcctcagggcaacgatatgacgaaaggcctgctgacctttgcgcaggagaaacccattggtgaagacggcttctattggctcaagattcatggcgcaaatacagctggagtggataaagtaccgtttccacaacgcatcaaatttgttgaggataaccatacgaatattatggaatgcgcgaaagcaccgctggaaaacacttggtgggcggaacaggactcgccgttctgctttctggcgttctgctttgagtatgctggcgtcatcaatagtggtctgtcgtacaactgtagcttgcctctggcattcgatggtagttgctccggcctgcaacatttctcagcgatgttacgcgacgaaattggcggcaaagctgtgaatctcctcccatctgcggaataccaggatatttatcgtatcgtcagcgacaaagttaacgagatgctgaaacaagatctgattaacggtacctctaccaccgtggaaacggtgactgataagaagacaggcgaaattacccaacgcacgaaatacgggaccaaagttatggcacagtggtggttagaacacggtgtgaatcgtggcgtcacgaaacgctcggttatgactttggtgtatggggcgctggagtttggattccgcgatcaagtgctgagtgacaccattcaaaaagcgatcgataacggcaagggtgacatgtttctgaatccgaatcaggctgctggttacatggcgaaactgatctggaacgcagtgtccgggaccgtagtcgcagcagttgaggcgatgaactggctgaaaagtgcggcgaaattacttgctgctgaagtgaaggatcgtaagacggatacagttctgcgtggccgctgcgcagtacattgggtgactcccgacggcttccctgtgtggcaggaatacaagaagcctattcagacgcgcttgaacctgatgttcctcggtcagttccgcttacagcctaccattaacaccaacaaagatagcgagattgatgcgcgcaaacaggtgtctggtatcgctcctaactttgtacacagcctggacggtaaccaccttcgtatgactgtagtgtgggcacacgagaagtacggaatcgaatcttttgcactgattcacgactccttcggtaccattccggctgacgctgcgaacctgttcaaagcagtgcgcgaaactttcgttgacacatatgagtcttgtgatgtactggctgatttctacgaccagattgctgaccagttgcacgagtctcaacgcgacaaaatgccagcacttccggctaaaggtaacttgaacctccgtgacatcttaaaatcggacttcgcgttcgcg

SEQ ID NO: 1994 - protein, 890 aa, synthetic construct
  REGION 1..890: note = Variant of RNA polymerase
MHHHHHHMNTINIAKNDFSDIELAAIPFNTLADHYGERLAREQLALEHESYEMGEARFRKMFERQLKAGEVADNAAAKPLITTLLPKMIARINDWFEEVKAKRGKRPTAFQFLQEIKPEAVAYITIKTTLACLTSADNTTVQAVASAIGKAIEDEARFGRIRDLEAKHFKKNVEEQLNKRVGHVYKKAFMQVVEHDMLSKGLLGGVVWSSWHKEDSIHVGVRCIEMLIESTGMVSLHRQNAGVVGQDSERIELAPEYAEAIATRAGALAGISPMFQPCVVPPKPWTGITGGGYWAAGRKPLQLVRTRSLAALRRYEEVSMPEVIKAVNIAQNTAWRINKKVLDVANTITQWKHCPVADIPAMDRGEMPARPLDIDTNEIALKAWKKEASAFYRKDSARVSRRLSMEFMLSQANKFANYEAIWFPWNMDWRGRVYAVPMFNPQGNDMTKGLLTFAQEKPIGEDGFYWLKIHGANTAGVDKVPFPQRIKFVEDNHTNIMECAKAPLENTWWAEQDSPFCFLAFCFEYAGVINSGLSYNCSLPLAFDGSCSGLQHFSAMLRDEIGGKAVNLLPSAEYQDIYRIVSDKVNEMLKQDLINGTSTTVETVTDKKTGEITQRTKYGTKVMAQWWLEHGVNRGVTKRSVMTLVYGALEFGFRDQVLSDTIQKAIDNGKGDMFLNPNQAAGYMAKLIWNAVSGTVVAAVEAMNWLKSAAKLLAAEVKDRKTDTVLRGRCAVHWVTPDGFPVWQEYKKPIQTRLNLMFLGQFRLQPTINTNKDSEIDARKQVSGIAPNFVHSLDGNHLRMTVVWAHEKYGIESFALIHDSFGTIPADAANLFKAVRETFVDTYESCDVLADFYDQIADQLHESQRDKMPALPAKGNLNLRDILKSDFAFA

SEQ ID NO: 1995 - DNA, 2670 bp, synthetic construct
  misc_feature 1..2670: note = Variant of RNA polymerase
  source 1..2670: mol_type = other DNA
atgcaccatcaccatcaccatatgaacacgattaacattgctaagaacgacttctctgacatcgaactggctgctatcccgttcaacactctggctgaccattacggtgagcgtttagctcgcgaacagttggcccttgagcatgagtcttacgagatgggtgaagcacgcttccgcaagatgtttgagcgtcaacttaaagctggtgaggttgcggataacgctaccgccaagcctctcatcactaccctactccctaagatgattgcacgcatcaacgactggtttgaggaagtgaaagccaagcgcggcaagcgcccgacagccttccagttcctgcaagaaatcaagccggaagccgtagcgtacatcaccattaagaccactctggcttgcctaaccagtgcggacaatacaaccgttcaggctgtagcaagcgcaatcggtaaagccattgaggacgaggctcgcttcggtcgtatccgtgaccttgaagctaagcacttcaagaagaacgttgaggaacaactcaacaagcgcgtagggcacgtctacaagaaagcatttatgcaagttgtcgagcacgacatgctctctaagggtctactcgggggcgtggtatggtcgtcgtggcataaggaagactctattcatgtaggagtacgctgcatcgagatgctcattgagtcaaccggaatggttagcttacaccgccaaaatgctggcgtagtaggtcaagactctgagcgtatcgaactcgcacctgaatacgctgaggctatcgcaacccgtgcaggtgcgctggctggcatctctccgatgttccaaccttgcgtagttcctcctaagccgtggactggcattactggtggtggctattgggctgcggggcgcaaacccctgcagttagtacgtactcgcagtctggcggcgcttcgccgctatgaagaagtgtcgatgccggaggtcatcaaagcagtgaacattgcgcagaatacagcatggcgtattaacaagaaagttctcgacgtagcgaataccatcacccaatggaaacactgtccagtcgcagatatccctgcgatggatcgtggcgaaatgccagctcgtccgttggacatcgataccaacgagattgcacttaaagcgtggaagaaagaagcttccgcgttctaccgcaaagacaaagcacgcgttagccgtcgtctgtcaatggagtttatgttatctcaggcgaacaagtttgcgaattatgaggcaatctggtttccgtggaacatggattggcgtgggcgcgtgtacgctgtcccgatgttcaatcctcagggcaacgatatgacgaaaggcctgctgacctttgcgcaggagaaacccattggtgaagacggcttctattggctcaagattcatggcgcaaatacagctggagtggataaagtaccgtttccacaacgcatcaaatttgttgaggataaccatacgaatattatggaatgcgcgaaagcaccgctggaaaacacttggtgggcggaacaggactcgccgttctgctttctggcgttctgctttgagtatgctggcgtcatcaatagtggtctgtcgtacaactgtagcttgcctctggcattcgatggtagttgctccggcctgcaacatttctcagcgatgttacgcgacgaaattggcggcaaagctgtgaatctcctcccatctgcggaataccaggatatttatcgtatcgtcagcgacaaagttaacgagatgctgaaacaagatctgattaacggtacctctaccaccgtggaaacggtgactgataagaagacaggcgaaattacccaacgcacgaaatacgggaccaaagttatggcacagtggtggttagaacacggtgtgaatcgtggcgtcacgaaacgctcggttatgactttggtgtatggggcgctggagtttggattccgcgatcaagtgctgagtgacaccattcaaaaagcgatcgataacggcaagggtgacatgtttctgaatccgaatcaggctgctggttacatggcgaaactgatctggaacgcagtgtccgggaccgtagtcgcagcagttgaggcgatgaactggctgaaaagtgcggcgaaattacttgctgctgaagtgaaggatcgtaagacggatacagttctgcgtggccgctgcgcagtacattgggtgactcccgacggcttccctgtgtggcaggaatacaagaagcctattcagacgcgcttgaacctgatgttcctcggtcagttccgcttacagcctaccattaacaccaacaaagatagcgagattgatgcgcgcaaacaggtgtctggtatcgctcctaactttgtacacagcctggacggtaaccaccttcgtatgactgtagtgtgggcacacgagaagtacggaatcgaatcttttgcactgattcacgactccttcggtaccattccggctgacgctgcgaacctgttcaaagcagtgcgcgaaactttcgttgacacatatgagtcttgtgatgtactggctgatttctacgaccagattgctgaccagttgcacgagtctcaacgcgacaaaatgccagcacttccggctaaaggtaacttgaacctccgtgacatcttaaaatcggacttcgcgttcgcg

SEQ ID NO: 1996 - protein, 890 aa, synthetic construct
  REGION 1..890: note = Variant of RNA polymerase
MHHHHHHMNTINIAKNDFSDIELAAIPFNTLADHYGERLAREQLALEHESYEMGEARFRKMFERQLKAGEVADNATAKPLITTLLPKMIARINDWFEEVKAKRGKRPTAFQFLQEIKPEAVAYITIKTTLACLTSADNTTVQAVASAIGKAIEDEARFGRIRDLEAKHFKKNVEEQLNKRVGHVYKKAFMQVVEHDMLSKGLLGGVVWSSWHKEDSIHVGVRCIEMLIESTGMVSLHRQNAGVVGQDSERIELAPEYAEAIATRAGALAGISPMFQPCVVPPKPWTGITGGGYWAAGRKPLQLVRTRSLAALRRYEEVSMPEVIKAVNIAQNTAWRINKKVLDVANTITQWKHCPVADIPAMDRGEMPARPLDIDTNEIALKAWKKEASAFYRKDKARVSRRLSMEFMLSQANKFANYEAIWFPWNMDWRGRVYAVPMFNPQGNDMTKGLLTFAQEKPIGEDGFYWLKIHGANTAGVDKVPFPQRIKFVEDNHTNIMECAKAPLENTWWAEQDSPFCFLAFCFEYAGVINSGLSYNCSLPLAFDGSCSGLQHFSAMLRDEIGGKAVNLLPSAEYQDIYRIVSDKVNEMLKQDLINGTSTTVETVTDKKTGEITQRTKYGTKVMAQWWLEHGVNRGVTKRSVMTLVYGALEFGFRDQVLSDTIQKAIDNGKGDMFLNPNQAAGYMAKLIWNAVSGTVVAAVEAMNWLKSAAKLLAAEVKDRKTDTVLRGRCAVHWVTPDGFPVWQEYKKPIQTRLNLMFLGQFRLQPTINTNKDSEIDARKQVSGIAPNFVHSLDGNHLRMTVVWAHEKYGIESFALIHDSFGTIPADAANLFKAVRETFVDTYESCDVLADFYDQIADQLHESQRDKMPALPAKGNLNLRDILKSDFAFA

SEQ ID NO: 1997 - DNA, 2670 bp, synthetic construct
  misc_feature 1..2670: note = Variant of RNA polymerase
  source 1..2670: mol_type = other DNA
atgcaccatcaccatcaccatatgaacacgattaacattgctaagaacgacttctctgacatcgaactggctgctatcccgttcaacactctggctgaccattacggtgagcgtttagctcgcgaacagttggcccttgagcatgagtcttacgagatgggtgaagcacgcttccgcaagatgtttgagcgtcaacttaaagctggtgaggttgcggataacgctgccgccaagcctctcatcactaccctactccctaagatgattgcacgcatcaacgactggtttgaggaagtgaaagccaagcgcggcaagcgcccgacagccttccagttcctgcaagaaatcaagccggaagccgtagcgtacatcaccattaagaccactctggcttgcctaaccagtgcggacaatacaaccgttcaggctgtagcaagcgcaatcggtaaagccattgaggacgaggctcgcttcggtcgtatccgtgaccttgaagctaagcacttcaagaagaacgttgaggaacaactcaacaagcgcgtagggcacgtctacaagaaagcatttatgcaagttgtcgagcacgacatgctctctaagggtctactcgggggcgtggtatggtcgtcgtggcataaggaagactctattcatgtaggagtacgctgcatcgagatgctcattgagtcaaccggaatggttagcttacaccgccaaaatgctggcgtagtaggtcaagactctgagcgtatcgaactcgcacctgaatacgctgaggctatcgcaacccgtgcaggtgcgctggctggcatctctccgatgttccaaccttgcgtagttcctcctaagccgtggactggcattactggtggtggctattgggctgcggggcgcaaacccctgcagttagtacgtactcgcagtctggcggcgcttcgccgctatgaagaagtgtcgatgccggaggtcatcaaagcagtcaacattgcgcagaatacagcatggcgtattaacaagaaagttctcgacgtagcgaataccatcacccaatggaaacactgtccagtcgcagatatccctgcgatggatcgtggcgaaatgccagctcgtccgttggacatcgataccaacgagattgcacttaaagcgtggaagaaagaagctgaggcgttctaccgcaaagacaaagcacgcgttagccgtcgtctgtcaatggagtttatgttatctcaggcgaacaagtttgcgaattatgaggcaatctggtttccgtggaacatggattggcgtgggcgcgtgtacgctgtcccgatgttcaatcctcagggcaacgatatgacgaaaggcctgctgacctttgcgcaggagaaacccattggtgaagacggcttctattggctcaagattcatggcgcaaatacagctggagtggataaagtaccgtttccacaacgcatcaaatttgttgaggataaccatacgaatattatggaatgcgcgaaagcaccgctggaaaacacttggtgggcggaacaggactcgccgttctgctttctggcgttctgctttgagtatgctggcgtcatcaatagtggtctgtcgtacaactgtagcttgcctctggcattcgatggtagttgctccggcctgcaacatttctcagcgatgttacgcgacgaaattggcggcaaagctgtgaatctcctcccatctgcggaataccaggatatttatcgtatcgtcagcgacaaagttaacgagatgctgaaacaagatctgattaacggtacctctaccaccgtggaaacggtgactgataagaagacaggcgaaattacccaacgcacgaaatacgggaccaaagttatggcacagtggtggttagaacacggtgtgaatcgtggcgtcacgaaacgctcggttatgactttggtgtatggggcgctggagtttggattccgcgatcaagtgctgagtgacaccattcaaaaagcgatcgataacggcaagggtgacatgtttctgaatccgaatcaggctgctggttacatggcgaaactgatctggaacgcagtgtccgggaccgtagtcgcagcagttgaggcgatgaactggctgaaaagtgcggcgaaattacttgctgctgaagtgaaggatcgtaagacggatacagttctgcgtggccgctgcgcagtacattgggtgactcccgacggcttccctgtgtggcaggaatacaagaagcctattcagacgcgcttgaacctgatgttcctcggtcagttccgcttacagcctaccattaacaccaacaaagatagcgagattgatgcgcgcaaacaggtgtctggtatcgctcctaactttgtacacagcctggacggtaaccaccttcgtatgactgtagtgtgggcacacgagaagtacggaatcgaatcttttgcactgattcacgactccttcggtaccattccggctgacgctgcgaacctgttcaaagcagtgcgcgaaactttcgttgacacatatgagtcttgtgatgtactggctgatttctacgaccagattgctgaccagttgcacgagtctcaacgcgacaaaatgccagcacttccggctaaaggtaacttgaacctccgtgacatcttaaaatcggacttcgcgttcgcg

SEQ ID NO: 1998 - protein, 890 aa, synthetic construct
  REGION 1..890: note = Variant of RNA polymerase
MHHHHHHMNTINIAKNDFSDIELAAIPFNTLADHYGERLAREQLALEHESYEMGEARFRKMFERQLKAGEVADNAAAKPLITTLLPKMIARINDWFEEVKAKRGKRPTAFQFLQEIKPEAVAYITIKTTLACLTSADNTTVQAVASAIGKAIEDEARFGRIRDLEAKHFKKNVEEQLNKRVGHVYKKAFMQVVEHDMLSKGLLGGVVWSSWHKEDSIHVGVRCIEMLIESTGMVSLHRQNAGVVGQDSERIELAPEYAEAIATRAGALAGISPMFQPCVVPPKPWTGITGGGYWAAGRKPLQLVRTRSLAALRRYEEVSMPEVIKAVNIAQNTAWRINKKVLDVANTITQWKHCPVADIPAMDRGEMPARPLDIDTNEIALKAWKKEAEAFYRKDKARVSRRLSMEFMLSQANKFANYEAIWFPWNMDWRGRVYAVPMFNPQGNDMTKGLLTFAQEKPIGEDGFYWLKIHGANTAGVDKVPFPQRIKFVEDNHTNIMECAKAPLENTWWAEQDSPFCFLAFCFEYAGVINSGLSYNCSLPLAFDGSCSGLQHFSAMLRDEIGGKAVNLLPSAEYQDIYRIVSDKVNEMLKQDLINGTSTTVETVTDKKTGEITQRTKYGTKVMAQWWLEHGVNRGVTKRSVMTLVYGALEFGFRDQVLSDTIQKAIDNGKGDMFLNPNQAAGYMAKLIWNAVSGTVVAAVEAMNWLKSAAKLLAAEVKDRKTDTVLRGRCAVHWVTPDGFPVWQEYKKPIQTRLNLMFLGQFRLQPTINTNKDSEIDARKQVSGIAPNFVHSLDGNHLRMTVVWAHEKYGIESFALIHDSFGTIPADAANLFKAVRETFVDTYESCDVLADFYDQIADQLHESQRDKMPALPAKGNLNLRDILKSDFAFA

SEQ ID NO: 1999 - DNA, 2670 bp, synthetic construct
  misc_feature 1..2670: note = Variant of RNA polymerase
  source 1..2670: mol_type = other DNA
atgcaccatcaccatcaccatatgaacacgattaacattgctaagaacgacttctctgacatcgaactggctgctatcccgttcaacactctggctgaccattacggtgagcgtttagctcgcgaacagttggcccttgagcatgagtcttacgagatgggtgaagcacgcttccgcaagatgtttgagcgtcaacttaaagctggtgaggttgcggataacgctgccgccaagcctctcatcactaccctactccctaagatgattgcacgcatcaacgactggtttgaggaagtgaaagccaagcgcggcaagcgcccgacagccttccagttcctgcaagaaatcaagccggaagccgtagcgtacatcaccattaagaccactctggcttgcctaaccagtgcggacaatacaaccgttcaggctgtagcaagcgcaatcggtaaagccattgaggacgaggctcgcttcggtcgtatccgtgaccttgaagctaagcacttcaagaagaacgttgaggaacaactcaacaagcgcgtagggcacgtctacaagaaagcatttatgcaagttgtcgagcacgacatgctctctaagggtctactcgggggcgtggtatggtcgtcgtggcataaggaagactctattcatgtaggagtacgctgcatcgagatgctcattgagtcaaccggaatggttagcttacaccgccaaaatgctggcgtagtaggtcaagactctgagcgtatcgaactcgcacctgaatacgctgaggctatcgcaacccgtgcaggtgcgctggctggcatctctccgatgttccaaccttgcgtagttcctcctaagccgtggactggcattactggtggtggctattgggctgcggggcgcaaacccctgcagttagtacgtactcgcagtctggcggcgcttcgccgctatgaagaagtgtcgatgccggaggtcatcaaagcagtcaacattgcgcagaatacagcatggcgtattaacaagaaagttctcgacgtagcgaataccatcacccaatggaaacactgtccagtcgcagatatccctgcgatggatcgtggcgaaatgccagctcgtccgttggacatcgataccaacgagattgcacttaaagcgtggaagaaagaagcttccgcgttctaccgcaaagacaaagcacgcgttagccgtcgtctgtcaatggagtttatgttatctcaggcgaacaagtttgcgaattatgaggcaatctggtttccgtggaacatggattggcgtgggcgcgtgtacgctgtcccgatgttcaatcctcagggcaacgatatgacgaaaggcctgctgacctttgcgcaggagaaacccattggtgaagacggcttctattggctcaagattcatggcgcaaatacagctggagtggataaagtaccgtttccacaacgcatcaaatttgttgaggataaccatacgaatattatggaatgcgcgaaagcaccgctggaaaacacttggtgggcggaacaggactcgccgttcaattttctggcgttctgctttgagtatgctggcgtcatcaatagtggtctgtcgtacaactgtagcttgcctctggcattcgatggtagttgctccggcctgcaacatttctcagcgatgttacgcgacgaaattggcggcaaagctgtgaatctcctcccatctgcggaataccaggatatttatcgtatcgtcagcgacaaagttaacgagatgctgaaacaagatctgattaacggtacctctaccaccgtggaaacggtgactgataagaagacaggcgaaattacccaacgcacgaaatacgggaccaaagttatggcacagtggtggttagaacacggtgtgaatcgtggcgtcacgaaacgctcggttatgactttggtgtatggggcgctggagtttggattccgcgatcaagtgctgagtgacaccattcaaaaagcgatcgataacggcaagggtgacatgtttctgaatccgaatcaggctgctggttacatggcgaaactgatctggaacgcagtgtccgggaccgtagtcgcagcagttgaggcgatgaactggctgaaaagtgcggcgaaattacttgctgctgaagtgaaggatcgtaagacggatacagttctgcgtggccgctgcgcagtacattgggtgactcccgacggcttccctgtgtggcaggaatacaagaagcctattcagacgcgcttgaacctgatgttcctcggtcagttccgcttacagcctaccattaacaccaacaaagatagcgagattgatgcgcgcaaacaggtgtctggtatcgctcctaactttgtacacagcctggacggtaaccaccttcgtatgactgtagtgtgggcacacgagaagtacggaatcgaatcttttgcactgattcacgactccttcggtaccattccggctgacgctgcgaacctgttcaaagcagtgcgcgaaactttcgttgacacatatgagtcttgtgatgtactggctgatttctacgaccagattgctgaccagttgcacgagtctcaacgcgacaaaatgccagcacttccggctaaaggtaacttgaacctccgtgacatcttaaaatcggacttcgcgttcgcg

SEQ ID NO: 2000 - protein, 890 aa, synthetic construct
  REGION 1..890: note = Variant of RNA polymerase
MHHHHHHMNTINIAKNDFSDIELAAIPFNTLADHYGERLAREQLALEHESYEMGEARFRKMFERQLKAGEVADNAAAKPLITTLLPKMIARINDWFEEVKAKRGKRPTAFQFLQEIKPEAVAYITIKTTLACLTSADNTTVQAVASAIGKAIEDEARFGRIRDLEAKHFKKNVEEQLNKRVGHVYKKAFMQVVEHDMLSKGLLGGVVWSSWHKEDSIHVGVRCIEMLIESTGMVSLHRQNAGVVGQDSERIELAPEYAEAIATRAGALAGISPMFQPCVVPPKPWTGITGGGYWAAGRKPLQLVRTRSLAALRRYEEVSMPEVIKAVNIAQNTAWRINKKVLDVANTITQWKHCPVADIPAMDRGEMPARPLDIDTNEIALKAWKKEASAFYRKDKARVSRRLSMEFMLSQANKFANYEAIWFPWNMDWRGRVYAVPMFNPQGNDMTKGLLTFAQEKPIGEDGFYWLKIHGANTAGVDKVPFPQRIKFVEDNHTNIMECAKAPLENTWWAEQDSPFNFLAFCFEYAGVINSGLSYNCSLPLAFDGSCSGLQHFSAMLRDEIGGKAVNLLPSAEYQDIYRIVSDKVNEMLKQDLINGTSTTVETVTDKKTGEITQRTKYGTKVMAQWWLEHGVNRGVTKRSVMTLVYGALEFGFRDQVLSDTIQKAIDNGKGDMFLNPNQAAGYMAKLIWNAVSGTVVAAVEAMNWLKSAAKLLAAEVKDRKTDTVLRGRCAVHWVTPDGFPVWQEYKKPIQTRLNLMFLGQFRLQPTINTNKDSEIDARKQVSGIAPNFVHSLDGNHLRMTVVWAHEKYGIESFALIHDSFGTIPADAANLFKAVRETFVDTYESCDVLADFYDQIADQLHESQRDKMPALPAKGNLNLRDILKSDFAFA

SEQ ID NO: 2001 - DNA, 2670 bp, synthetic construct
  misc_feature 1..2670: note = Variant of RNA polymerase
  source 1..2670: mol_type = other DNA
atgcaccatcaccatcaccatatgaacacgattaacattgctaagaacgacttctctgacatcgaactggctgctatcccgttcaacactctggctgaccattacggtgagcgtttagctcgcgaacagttggcccttgagcatgagtcttacgagatgggtgaagcacgcttccgcaagatgtttgagcgtcaacttaaagctggtgaggttgcggataacgctgccgccaagcctctcatcactaccctactccctaagatgattgcacgcatcaacgactggtttgaggaagtgaaagccaagcgcggcaagcgcccgacagccttccagttcctgcaagaaatcaagccggaagccgtagcgtacatcaccattaagaccactctggcttgcctaaccagtgcggacaatacaaccgttcaggctgtagcaagcgcaatcggtaaagccattgaggacgaggctcgcttcggtcgtatccgtgaccttgaagctaagcacttcaagaagaacgttgaggaacaactcaacaagcgcgtagggcacgtctacaagaaagcatttatgcaagttgtcgagcacgacatgctctctaagggtctactcgggggcgtggtatggtcgtcgtggcataaggaagactctattcatgtaggagtacgctgcatcgagatgctcattgagtcaaccggaatggttagcttacaccgccaaaatgctggcgtagtaggtcaagactctgagcgtatcgaactcgcacctgaatacgctgaggctatcgcaacccgtgcaggtgcgctggctggcatctctccggctttccaaccttgcgtagttcctcctaagccgtggactggcattactggtggtggctattgggctgcggggcgcaaacccctgcagttagtacgtactcgcagtctggcggcgcttcgccgctatgaagaagtgtcgatgccggaggtcatcaaagcagtcaacattgcgcagaatacagcatggcgtattaacaagaaagttctcgacgtagcgaataccatcacccaatggaaacactgtccagtcgcagatatccctgcgatggatcgtggcgaaatgccagctcgtccgttggacatcgataccaacgagattgcacttaaagcgtggaagaaagaagcttccgcgttctaccgcaaagacaaagcacgcgttagccgtcgtctgtcaatggagtttatgttatctcaggcgaacaagtttgcgaattatgaggcaatctggtttccgtggaacatggattggcgtgggcgcgtgtacgctgtcccgatgttcaatcctcagggcaacgatatgacgaaaggcctgctgacctttgcgcaggagaaacccattggtgaagacggcttctattggctcaagattcatggcgcaaatacagctggagtggataaagtaccgtttccacaacgcatcaaatttgttgaggataaccatacgaatattatggaatgcgcgaaagcaccgctggaaaacacttggtgggcggaacaggactcgccgttctgctttctggcgttctgctttgagtatgctggcgtcatcaatagtggtctgtcgtacaactgtagcttgcctctggcattcgatggtagttgctccggcctgcaacatttctcagcgatgttacgcgacgaaattggcggcaaagctgtgaatctcctcccatctgcggaataccaggatatttatcgtatcgtcagcgacaaagttaacgagatgctgaaacaagatctgattaacggtacctctaccaccgtggaaacggtgactgataagaagacaggcgaaattacccaacgcacgaaatacgggaccaaagttatggcacagtggtggttagaacacggtgtgaatcgtggcgtcacgaaacgctcggttatgactttggtgtatggggcgctggagtttggattccgcgatcaagtgctgagtgacaccattcaaaaagcgatcgataacggcaagggtgacatgtttctgaatccgaatcaggctgctggttacatggcgaaactgatctggaacgcagtgtccgggaccgtagtcgcagcagttgaggcgatgaactggctgaaaagtgcggcgaaattacttgctgctgaagtgaaggatcgtaagacggatacagttctgcgtggccgctgcgcagtacattgggtgactcccgacggcttccctgtgtggcaggaatacaagaagcctattcagacgcgcttgaacctgatgttcctcggtcagttccgcttacagcctaccattaacaccaacaaagatagcgagattgatgcgcgcaaacaggtgtctggtatcgctcctaactttgtacacagcctggacggtaaccaccttcgtatgactgtagtgtgggcacacgagaagtacggaatcgaatcttttgcactgattcacgactccttcggtaccattccggctgacgctgcgaacctgttcaaagcagtgcgcgaaactttcgttgacacatatgagtcttgtgatgtactggctgatttctacgaccagattgctgaccagttgcacgagtctcaacgcgacaaaatgccagcacttccggctaaaggtaacttgaacctccgtgacatcttaaaatcggacttcgcgttcgcg

SEQ ID NO: 2002 - protein, 890 aa, synthetic construct
  REGION 1..890: note = Variant of RNA polymerase
MHHHHHHMNTINIAKNDFSDIELAAIPFNTLADHYGERLAREQLALEHESYEMGEARFRKMFERQLKAGEVADNAAAKPLITTLLPKMIARINDWFEEVKAKRGKRPTAFQFLQEIKPEAVAYITIKTTLACLTSADNTTVQAVASAIGKAIEDEARFGRIRDLEAKHFKKNVEEQLNKRVGHVYKKAFMQVVEHDMLSKGLLGGVVWSSWHKEDSIHVGVRCIEMLIESTGMVSLHRQNAGVVGQDSERIELAPEYAEAIATRAGALAGISPAFQPCVVPPKPWTGITGGGYWAAGRKPLQLVRTRSLAALRRYEEVSMPEVIKAVNIAQNTAWRINKKVLDVANTITQWKHCPVADIPAMDRGEMPARPLDIDTNEIALKAWKKEASAFYRKDKARVSRRLSMEFMLSQANKFANYEAIWFPWNMDWRGRVYAVPMFNPQGNDMTKGLLTFAQEKPIGEDGFYWLKIHGANTAGVDKVPFPQRIKFVEDNHTNIMECAKAPLENTWWAEQDSPFCFLAFCFEYAGVINSGLSYNCSLPLAFDGSCSGLQHFSAMLRDEIGGKAVNLLPSAEYQDIYRIVSDKVNEMLKQDLINGTSTTVETVTDKKTGEITQRTKYGTKVMAQWWLEHGVNRGVTKRSVMTLVYGALEFGFRDQVLSDTIQKAIDNGKGDMFLNPNQAAGYMAKLIWNAVSGTVVAAVEAMNWLKSAAKLLAAEVKDRKTDTVLRGRCAVHWVTPDGFPVWQEYKKPIQTRLNLMFLGQFRLQPTINTNKDSEIDARKQVSGIAPNFVHSLDGNHLRMTVVWAHEKYGIESFALIHDSFGTIPADAANLFKAVRETFVDTYESCDVLADFYDQIADQLHESQRDKMPALPAKGNLNLRDILKSDFAFA

SEQ ID NO: 2003 - DNA, 2670 bp, synthetic construct
  misc_feature 1..2670: note = Variant of RNA polymerase
  source 1..2670: mol_type = other DNA
atgcaccatcaccatcaccatatgaacacgattaacattgctaagaacgacttctctgacatcgaactggctgctatcccgttcaacactctggctgaccattacggtgagcgtttagctcgcgaacagttggcccttgagcatgagtcttacgagatgggtgaagcacgcttccgcaagatgtttgagcgtcaacttaaagctggtgaggttgcggataacgctgccgccaagcctctcatcactaccctactccctaagatgattgcacgcatcaacgactggtttgaggaagtgaaagccaagcgcggcaagcgcccgacagccttccagttcctgcaagaaatcaagccggaagccgtagcgtacatcaccattaagaccactctggcttgcctaaccagtgcggacaatacaaccgttcaggctgtagcaagcgcaatcggtaaagccattgaggacgaggctcgcttcggtcgtatccgtgaccttgaagctaagcacttcaagaagaacgttgaggaacaactcaacaagcgcgtagggcacgtctacaagaaagcatttatgcaagttgtcgagcacgacatgctctctaagggtctactcgggggcgtggtatggtcgtcgtggcataaggaagactctattcatgtaggagtacgctgcatcgagatgctcattgagtcaaccggaatggttagcttacaccgccaaaatgctggcgtagtaggtcaagactctgagcgtatcgaactcgcacctgaatacgctgaggctatcgcaacccgtgcaggtgcgctggctggcatctctccgatgttccaaccttgcgtagttcctcctaagccgtggactggcattactggtggtggctattgggctgcggggcgcaaacccctgcagttagtacgtactcgcagtctggcggcgcttcgccgctatgaagaagtgtcgatgccggaggtcatcaaagcagtcaacattgcgcagaatacagcatggcgtattaacaagaaagttctcgacgtagcgaataccatcacccaatggaaacactgtccagtcgcagatatccctgcgatggatcgtggcgaaatgccagctcgtccgttggacatcgataccaacgagattgcacttaaagcgtggaagaaagaagcttccgcgttctaccgcaaagacaaagcacgcgttagccgtcgtctgtcaatggagtttatgttatctcaggcgaacaagtttgcgaattatgaggcaatctggtttccgtggaacatggattggcgtgggcgcgtgtacgctgtcccgatgttcaatcctcagggcaacgatatgacgaaaggcctgctgacctttgcgcaggagaaacccattggtgaagacggcttctattggctcaagattcatggcgcaaatacagctggagtggataaagtaccgtttccacaacgcatcaaatttgttgaggataaccatacgaatattatggaatgcgcgaaagcaccgctggaaaacacttggtgggcggaacaggactcgccgttctgctttctggcgttctgctttgagtatgctggcgtcatcaatagtggtctgtcgtacaactgtagcttgcctctggcattcgatggtagttgctccggcctgcaacatttctcagcgatgttacgcgacgaaattggcggcaaagctgtgaatctcctcccatctgcggaataccaggatatttatcgtatcgtcagcgacaaagttaacgagatgctgaaacaagatctgattaacggtacctctaccaccgtggaaacggtgactgataagaagacaggcgaaattacccaacgcacgaaatacgggaccaaagttatggcacagtggtggttagaacacggtgtgaatcgtggcgtcacgaaacgctcggttatgactttggtgtatggggcgctggagtttggattccgcgatcaagtgctgagtgacaccattcaaaaagcgatcgataacggcaagggtgacatgtttctgaatccgaatcaggctgctggttacatggcgaaactgatctggaacgcagtgaaggggaccgtagtcgcagcagttgaggcgatgaactggctgaaaagtgcggcgaaattacttgctgctgaagtgaaggatcgtaagacggatacagttctgcgtggccgctgcgcagtacattgggtgactcccgacggcttccctgtgtggcaggaatacaagaagcctattcagacgcgcttgaacctgatgttcctcggtcagttccgcttacagcctaccattaacaccaacaaagatagcgagattgatgcgcgcaaacaggtgtctggtatcgctcctaactttgtacacagcctggacggtaaccaccttcgtatgactgtagtgtgggcacacgagaagtacggaatcgaatcttttgcactgattcacgactccttcggtaccattccggctgacgctgcgaacctgttcaaagcagtgcgcgaaactttcgttgacacatatgagtcttgtgatgtactggctgatttctacgaccagattgctgaccagttgcacgagtctcaacgcgacaaaatgccagcacttccggctaaaggtaacttgaacctccgtgacatcttaaaatcggacttcgcgttcgcg

SEQ ID NO: 2004 - protein, 890 aa, synthetic construct
  REGION 1..890: note = Variant of RNA polymerase
MHHHHHHMNTINIAKNDFSDIELAAIPFNTLADHYGERLAREQLALEHESYEMGEARFRKMFERQLKAGEVADNAAAKPLITTLLPKMIARINDWFEEVKAKRGKRPTAFQFLQEIKPEAVAYITIKTTLACLTSADNTTVQAVASAIGKAIEDEARFGRIRDLEAKHFKKNVEEQLNKRVGHVYKKAFMQVVEHDMLSKGLLGGVVWSSWHKEDSIHVGVRCIEMLIESTGMVSLHRQNAGVVGQDSERIELAPEYAEAIATRAGALAGISPMFQPCVVPPKPWTGITGGGYWAAGRKPLQLVRTRSLAALRRYEEVSMPEVIKAVNIAQNTAWRINKKVLDVANTITQWKHCPVADIPAMDRGEMPARPLDIDTNEIALKAWKKEASAFYRKDKARVSRRLSMEFMLSQANKFANYEAIWFPWNMDWRGRVYAVPMFNPQGNDMTKGLLTFAQEKPIGEDGFYWLKIHGANTAGVDKVPFPQRIKFVEDNHTNIMECAKAPLENTWWAEQDSPFCFLAFCFEYAGVINSGLSYNCSLPLAFDGSCSGLQHFSAMLRDEIGGKAVNLLPSAEYQDIYRIVSDKVNEMLKQDLINGTSTTVETVTDKKTGEITQRTKYGTKVMAQWWLEHGVNRGVTKRSVMTLVYGALEFGFRDQVLSDTIQKAIDNGKGDMFLNPNQAAGYMAKLIWNAVKGTVVAAVEAMNWLKSAAKLLAAEVKDRKTDTVLRGRCAVHWVTPDGFPVWQEYKKPIQTRLNLMFLGQFRLQPTINTNKDSEIDARKQVSGIAPNFVHSLDGNHLRMTVVWAHEKYGIESFALIHDSFGTIPADAANLFKAVRETFVDTYESCDVLADFYDQIADQLHESQRDKMPALPAKGNLNLRDILKSDFAFA

SEQ ID NO: 2005 - DNA, 2670 bp, synthetic construct
  misc_feature 1..2670: note = Variant of RNA polymerase
  source 1..2670: mol_type = other DNA
atgcaccatcaccatcaccatatgaacacgattaacattgctaagaacgacttctctgacatcgaactggctgctatcccgttcaacactctggctgaccattacggtgagcgtttagctcgcgaacagttggcccttgagcatgagtcttacgagatgggtgaagcacgcttccgcaagatgtttgagcgtcaacttaaagctggtgaggttgcggataacgctgccgccaagcctctcatcactaccctactccctaagatgattgcacgcatcaacgactggtttgaggaagtgaaagccaagcgcggcaagcgcccgacagccttccagttcctgcaagaaatcaagccggaagccgtagcgtacatcaccattaagaccactctggcttgcctaaccagtgcggacaatacaaccgttcaggctgtagcaagcgcaatcggtaaagccattgaggacgaggctcgcttcggtcgtatccgtgaccttgaagctaagcacttcaagaagaacgttgaggaacaactcaacaagcgcgtagggcacgtctacaagaaagcatttatgcaagttgtcgagcacgacatgctctctaagggtctactcgggggcgtggtatggtcgtcgtggcataaggaagactctattcatgtaggagtacgctgcatcgagatgctcattgagtcaaccggaatggttagcttacaccgccaaaatgctggcgtagtaggtcaagactctgagcgtatcgaactcgcacctgaatacgctgaggctatcgcaacccgtgcaggtgcgctggctggcatctctccgatgttccaaccttgcgtagttcctcctaagccgtggactggcattactggtggtggctattgggctgcggggcgcaaacccctgcagttagtacgtactcgcagtctggcggcgcttcgccgctatgaagaagtgtcgatgccggaggtcatcaaagcagtcaacattgcgcagaatacagcatggcgtattaacaagaaagttctcgacgtagcgaataccatcacccaatggaaacactgtccagtcgcagatatccctgcgatggatcgtggcgaaatgccagctcgtccgttggacatcgataccaacgagattgcacttaaagcgtggaagaaagaagcttccgcgttctaccgcaaagacaaagcacgcgttagccgtcgtctgtcaatggagtttatgttaaagcaggcgaacaagtttgcgaattatgaggcaatctggtttccgtggaacatggattggcgtgggcgcgtgtacgctgtcccgatgttcaatcctcagggcaacgatatgacgaaaggcctgctgacctttgcgcaggagaaacccattggtgaagacggcttctattggctcaagattcatggcgcaaatacagctggagtggataaagtaccgtttccacaacgcatcaaatttgttgaggataaccatacgaatattatggaatgcgcgaaagcaccgctggaaaacacttggtgggcggaacaggactcgccgttctgctttctggcgttctgctttgagtatgctggcgtcatcaatagtggtctgtcgtacaactgtagcttgcctctggcattcgatggtagttgctccggcctgcaacatttctcagcgatgttacgcgacgaaattggcggcaaagctgtgaatctcctcccatctgcggaataccaggatatttatcgtatcgtcagcgacaaagttaacgagatgctgaaacaagatctgattaacggtacctctaccaccgtggaaacggtgactgataagaagacaggcgaaattacccaacgcacgaaatacgggaccaaagttatggcacagtggtggttagaacacggtgtgaatcgtggcgtcacgaaacgctcggttatgactttggtgtatggggcgctggagtttggattccgcgatcaagtgctgagtgacaccattcaaaaagcgatcgataacggcaagggtgacatgtttctgaatccgaatcaggctgctggttacatggcgaaactgatctggaacgcagtgtccgggaccgtagtcgcagcagttgaggcgatgaactggctgaaaagtgcggcgaaattacttgctgctgaagtgaaggatcgtaagacggatacagttctgcgtggccgctgcgcagtacattgggtgactcccgacggcttccctgtgtggcaggaatacaagaagcctattcagacgcgcttgaacctgatgttcctcggtcagttccgcttacagcctaccattaacaccaacaaagatagcgagattgatgcgcgcaaacaggtgtctggtatcgctcctaactttgtacacagcctggacggtaaccaccttcgtatgactgtagtgtgggcacacgagaagtacggaatcgaatcttttgcactgattcacgactccttcggtaccattccggctgacgctgcgaacctgttcaaagcagtgcgcgaaactttcgttgacacatatgagtcttgtgatgtactggctgatttctacgaccagattgctgaccagttgcacgagtctcaacgcgacaaaatgccagcacttccggctaaaggtaacttgaacctccgtgacatcttaaaatcggacttcgcgttcgcg

SEQ ID NO: 2006 - protein, 890 aa, synthetic construct
  REGION 1..890: note = Variant of RNA polymerase
MHHHHHHMNTINIAKNDFSDIELAAIPFNTLADHYGERLAREQLALEHESYEMGEARFRKMFERQLKAGEVADNAAAKPLITTLLPKMIARINDWFEEVKAKRGKRPTAFQFLQEIKPEAVAYITIKTTLACLTSADNTTVQAVASAIGKAIEDEARFGRIRDLEAKHFKKNVEEQLNKRVGHVYKKAFMQVVEHDMLSKGLLGGVVWSSWHKEDSIHVGVRCIEMLIESTGMVSLHRQNAGVVGQDSERIELAPEYAEAIATRAGALAGISPMFQPCVVPPKPWTGITGGGYWAAGRKPLQLVRTRSLAALRRYEEVSMPEVIKAVNIAQNTAWRINKKVLDVANTITQWKHCPVADIPAMDRGEMPARPLDIDTNEIALKAWKKEASAFYRKDKARVSRRLSMEFMLKQANKFANYEAIWFPWNMDWRGRVYAVPMFNPQGNDMTKGLLTFAQEKPIGEDGFYWLKIHGANTAGVDKVPFPQRIKFVEDNHTNIMECAKAPLENTWWAEQDSPFCFLAFCFEYAGVINSGLSYNCSLPLAFDGSCSGLQHFSAMLRDEIGGKAVNLLPSAEYQDIYRIVSDKVNEMLKQDLINGTSTTVETVTDKKTGEITQRTKYGTKVMAQWWLEHGVNRGVTKRSVMTLVYGALEFGFRDQVLSDTIQKAIDNGKGDMFLNPNQAAGYMAKLIWNAVSGTVVAAVEAMNWLKSAAKLLAAEVKDRKTDTVLRGRCAVHWVTPDGFPVWQEYKKPIQTRLNLMFLGQFRLQPTINTNKDSEIDARKQVSGIAPNFVHSLDGNHLRMTVVWAHEKYGIESFALIHDSFGTIPADAANLFKAVRETFVDTYESCDVLADFYDQIADQLHESQRDKMPALPAKGNLNLRDILKSDFAFA

SEQ ID NO: 2007 - DNA, 2670 bp, synthetic construct
  misc_feature 1..2670: note = Variant of RNA polymerase
  source 1..2670: mol_type = other DNA
atgcaccatcaccatcaccatatgaacacgattaacattgctaagaacgacttctctgacatcgaactggctgctatcccgttcaacactctggctgaccattacggtgagcgtttagctcgcgaacagttggcccttgagcatgagtcttacgagatgggtgaagcacgcttccgcaagatgtttgagcgtcaacttaaagctggtgaggttgcggataacgctgccgccaagcctctcatcactaccctactccctaagatgattgcacgcatcaacgactggtttgaggaagtgaaagccaagcgcggcaagcgcccgacagccttccagttcctgcaagaaatcaagccggaagccgtagcgtacatcaccattaagaccactctggcttgcctaaccagtgcggacaatacaaccgttcaggctgtagcaagcgcaatcggtaaagccattgaggacgaggctcgcttcggtcgtatccgtgaccttgaagctaagcacttcaagaagaacgttgaggaacaactcaacaagcgcgtagggcacgtctacaagaaagcatttatgcaagttgtcgagcacgacatgctctctaagggtctactcgggggcgtggtatggtcgtcgtggcataaggaagactctattcatgtaggagtacgctgcatcgagatgctcattgagtcaaccggaatggttagcttacaccgccaaaatgctggcgtagtaggtcaagactctgagcgtatcgaactcgcacctgaatacgctgaggctatcgcaacccgtgcaggtgcgctggctggcatctctccgatgttccaaccttgcgtagttcctcctaagccgtggactggcattactggtggtggctattgggctgcggggcgcaaacccctgcagttagtacgtactcgcagtctggcggcgcttcgccgctatgaagaagtgtcgatgccggaggtcatcaaagcagtcaacattgcgcagaatacagcatggcgtattaacaagaaagttctcgacgtagcgaataccatcacccaatggaaacactgtccagtcgcagatatccctgcgatggatcgtggcgaaatgccagctcgtccgttggacatcgataccaacgagattgcacttaaagcgtggaagaaagaagcttccgcgttctaccgcaaagacaaagcacgcgttagccgtcgtctgtcaatggagtttatgttatctcaggcgaacaagtttgcgaattatgaggcaatctggtttccgtggaacatggattggcgtgggcgcgtgtacgctgtcccgatgttcaatcctcagggcaacgatatgacgaaaggcctgctgacctttgcgcaggagaaacccattggtgaagacggcttctattggctcaagattcatggcgcaaatacagctggagtggataaagtaccgtttccacaacgcatcaaatttgttgaggataaccatacgaatattatggaatgcgcgaaagcaccgctggaaaacacttggtgggcggaacaggactcgccgttctgctttctggcgttctgctttgagtatgctggcgtcatcaatagtggtctgtcgtacaactgtagcttgcctctggcattcgatggtagttgctccggcctgcaacatctgtcagcgatgttacgcgacgaaattggcggcaaagctgtgaatctcctcccatctgcggaataccaggatatttatcgtatcgtcagcgacaaagttaacgagatgctgaaacaagatctgattaacggtacctctaccaccgtggaaacggtgactgataagaagacaggcgaaattacccaacgcacgaaatacgggaccaaagttatggcacagtggtggttagaacacggtgtgaatcgtggcgtcacgaaacgctcggttatgactttggtgtatggggcgctggagtttggattccgcgatcaagtgctgagtgacaccattcaaaaagcgatcgataacggcaagggtgacatgtttctgaatccgaatcaggctgctggttacatggcgaaactgatctggaacgcagtgtccgggaccgtagtcgcagcagttgaggcgatgaactggctgaaaagtgcggcgaaattacttgctgctgaagtgaaggatcgtaagacggatacagttctgcgtggccgctgcgcagtacattgggtgactcccgacggcttccctgtgtggcaggaatacaagaagcctattcagacgcgcttgaacctgatgttcctcggtcagttccgcttacagcctaccattaacaccaacaaagatagcgagattgatgcgcgcaaacaggtgtctggtatcgctcctaactttgtacacagcctggacggtaaccaccttcgtatgactgtagtgtgggcacacgagaagtacggaatcgaatcttttgcactgattcacgactccttcggtaccattccggctgacgctgcgaacctgttcaaagcagtgcgcgaaactttcgttgacacatatgagtcttgtgatgtactggctgatttctacgaccagattgctgaccagttgcacgagtctcaacgcgacaaaatgccagcacttccggctaaaggtaacttgaacctccgtgacatcttaaaatcggacttcgcgttcgcg

SEQ ID NO: 2008 - protein, 890 aa, synthetic construct
  REGION 1..890: note = Variant of RNA polymerase
MHHHHHHMNTINIAKNDFSDIELAAIPFNTLADHYGERLAREQLALEHESYEMGEARFRKMFERQLKAGEVADNAAAKPLITTLLPKMIARINDWFEEVKAKRGKRPTAFQFLQEIKPEAVAYITIKTTLACLTSADNTTVQAVASAIGKAIEDEARFGRIRDLEAKHFKKNVEEQLNKRVGHVYKKAFMQVVEHDMLSKGLLGGVVWSSWHKEDSIHVGVRCIEMLIESTGMVSLHRQNAGVVGQDSERIELAPEYAEAIATRAGALAGISPMFQPCVVPPKPWTGITGGGYWAAGRKPLQLVRTRSLAALRRYEEVSMPEVIKAVNIAQNTAWRINKKVLDVANTITQWKHCPVADIPAMDRGEMPARPLDIDTNEIALKAWKKEASAFYRKDKARVSRRLSMEFMLSQANKFANYEAIWFPWNMDWRGRVYAVPMFNPQGNDMTKGLLTFAQEKPIGEDGFYWLKIHGANTAGVDKVPFPQRIKFVEDNHTNIMECAKAPLENTWWAEQDSPFCFLAFCFEYAGVINSGLSYNCSLPLAFDGSCSGLQHLSAMLRDEIGGKAVNLLPSAEYQDIYRIVSDKVNEMLKQDLINGTSTTVETVTDKKTGEITQRTKYGTKVMAQWWLEHGVNRGVTKRSVMTLVYGALEFGFRDQVLSDTIQKAIDNGKGDMFLNPNQAAGYMAKLIWNAVSGTVVAAVEAMNWLKSAAKLLAAEVKDRKTDTVLRGRCAVHWVTPDGFPVWQEYKKPIQTRLNLMFLGQFRLQPTINTNKDSEIDARKQVSGIAPNFVHSLDGNHLRMTVVWAHEKYGIESFALIHDSFGTIPADAANLFKAVRETFVDTYESCDVLADFYDQIADQLHESQRDKMPALPAKGNLNLRDILKSDFAFA

SEQ ID NO: 2009 - DNA, 2670 bp, synthetic construct
  misc_feature 1..2670: note = Variant of RNA polymerase
  source 1..2670: mol_type = other DNA
atgcaccatcaccatcaccatatgaacacgattaacattgctaagaacgacttctctgacatcgaactggctgctatcccgttcaacactctggctgaccattacggtgagcgtttagctcgcgaacagttggcccttgagcatgagtcttacgagatgggtgaagcacgcttccgcaagatgtttgagcgtcaacttaaagctggtgaggttgcggataacgctgccgccaagcctctcatcactaccctactccctaagatgattgcacgcatcaacgactggtttgaggaagtgaaagccaagcgcggcaagcgcccgacagccttccagttcctgcaagaaatcaagccggaagccgtagcgtacatcaccattaagaccactctggcttgcctaaccagtgcggacaatacaaccgttcaggctgtagcaagcgcaatcggtaaagccattgaggacgaggctcgcttcggtcgtatccgtgaccttgaagctaagcacttcaagaagaacgttgaggaacaactcaacaagcgcgtagggcacgtctacaagaaagcatttatgcaagttgtcgagcacgacatgctctctaagggtctactcgggggcgtggtatggtcgtcgtggcataaggaagactctattcatgtaggagtacgctgcatcgagatgctcattgagtcaaccggaatggttagcttacaccgccaaaatgctggcgtagtaggtcaagactctgagcgtatcgaactcgcacctgaatacgctgaggctatcgcaacccgtgcaggtgcgctggctggcatctctccgatgttccaaccttgcgtagttcctcctaagccgtggactggcattactggtggtggctattgggctgcggggcgcaaacccctgcagttagtacgtactcgcagtctggcggcgcttcgccgctatgaagaagtgtcgatgccggaggtcatcaaagcagtcaacattgcgcagaatacagcatggcgtattaacaagaaagttctcgacgtagcgaataccatcacccaatggaaacactgtccagtcgcagatatccctgcgatggatcgtggcgaaatgccagctcgtccgttggacatcgataccaacgagattgcacttaaagcgtggaagaaagaagcttgtgcgttctaccgcaaagacaaagcacgcgttagccgtcgtctgtcaatggagtttatgttatctcaggcgaacaagtttgcgaattatgaggcaatctggtttccgtggaacatggattggcgtgggcgcgtgtacgctgtcccgatgttcaatcctcagggcaacgatatgacgaaaggcctgctgacctttgcgcaggagaaacccattggtgaagacggcttctattggctcaagattcatggcgcaaatacagctggagtggataaagtaccgtttccacaacgcatcaaatttgttgaggataaccatacgaatattatggaatgcgcgaaagcaccgctggaaaacacttggtgggcggaacaggactcgccgttctgctttctggcgttctgctttgagtatgctggcgtcatcaatagtggtctgtcgtacaactgtagcttgcctctggcattcgatggtagttgctccggcctgcaacatttctcagcgatgttacgcgacgaaattggcggcaaagctgtgaatctcctcccatctgcggaataccaggatatttatcgtatcgtcagcgacaaagttaacgagatgctgaaacaagatctgattaacggtacctctaccaccgtggaaacggtgactgataagaagacaggcgaaattacccaacgcacgaaatacgggaccaaagttatggcacagtggtggttagaacacggtgtgaatcgtggcgtcacgaaacgctcggttatgactttggtgtatggggcgctggagtttggattccgcgatcaagtgctgagtgacaccattcaaaaagcgatcgataacggcaagggtgacatgtttctgaatccgaatcaggctgctggttacatggcgaaactgatctggaacgcagtgtccgggaccgtagtcgcagcagttgaggcgatgaactggctgaaaagtgcggcgaaattacttgctgctgaagtgaaggatcgtaagacggatacagttctgcgtggccgctgcgcagtacattgggtgactcccgacggcttccctgtgtggcaggaatacaagaagcctattcagacgcgcttgaacctgatgttcctcggtcagttccgcttacagcctaccattaacaccaacaaagatagcgagattgatgcgcgcaaacaggtgtctggtatcgctcctaactttgtacacagcctggacggtaaccaccttcgtatgactgtagtgtgggcacacgagaagtacggaatcgaatcttttgcactgattcacgactccttcggtaccattccggctgacgctgcgaacctgttcaaagcagtgcgcgaaactttcgttgacacatatgagtcttgtgatgtactggctgatttctacgaccagattgctgaccagttgcacgagtctcaacgcgacaaaatgccagcacttccggctaaaggtaacttgaacctccgtgacatcttaaaatcggacttcgcgttcgcg

SEQ ID NO: 2010 - protein, 890 aa, synthetic construct
  REGION 1..890: note = Variant of RNA polymerase
MHHHHHHMNTINIAKNDFSDIELAAIPFNTLADHYGERLAREQLALEHESYEMGEARFRKMFERQLKAGEVADNAAAKPLITTLLPKMIARINDWFEEVKAKRGKRPTAFQFLQEIKPEAVAYITIKTTLACLTSADNTTVQAVASAIGKAIEDEARFGRIRDLEAKHFKKNVEEQLNKRVGHVYKKAFMQVVEHDMLSKGLLGGVVWSSWHKEDSIHVGVRCIEMLIESTGMVSLHRQNAGVVGQDSERIELAPEYAEAIATRAGALAGISPMFQPCVVPPKPWTGITGGGYWAAGRKPLQLVRTRSLAALRRYEEVSMPEVIKAVNIAQNTAWRINKKVLDVANTITQWKHCPVADIPAMDRGEMPARPLDIDTNEIALKAWKKEACAFYRKDKARVSRRLSMEFMLSQANKFANYEAIWFPWNMDWRGRVYAVPMFNPQGNDMTKGLLTFAQEKPIGEDGFYWLKIHGANTAGVDKVPFPQRIKFVEDNHTNIMECAKAPLENTWWAEQDSPFCFLAFCFEYAGVINSGLSYNCSLPLAFDGSCSGLQHFSAMLRDEIGGKAVNLLPSAEYQDIYRIVSDKVNEMLKQDLINGTSTTVETVTDKKTGEITQRTKYGTKVMAQWWLEHGVNRGVTKRSVMTLVYGALEFGFRDQVLSDTIQKAIDNGKGDMFLNPNQAAGYMAKLIWNAVSGTVVAAVEAMNWLKSAAKLLAAEVKDRKTDTVLRGRCAVHWVTPDGFPVWQEYKKPIQTRLNLMFLGQFRLQPTINTNKDSEIDARKQVSGIAPNFVHSLDGNHLRMTVVWAHEKYGIESFALIHDSFGTIPADAANLFKAVRETFVDTYESCDVLADFYDQIADQLHESQRDKMPALPAKGNLNLRDILKSDFAFA

SEQ ID NO: 2011 - DNA, 2670 bp, synthetic construct
  misc_feature 1..2670: note = Variant of RNA polymerase
  source 1..2670: mol_type = other DNA
atgcaccatcaccatcaccatatgaacacgattaacattgctaagaacgacttctctgacatcgaactggctgctatcccgttcaacactctggctgaccattacggtgagcgtttagctcgcgaacagttggcccttgagcatgagtcttacgagatgggtgaagcacgcttccgcaagatgtttgagcgtcaacttaaagctggtgaggttgcggataacgctgccgccaagcctctcatcactaccctactccctaagatgattgcacgcatcaacgactggtttgaggaagtgaaagccaagcgcggcaagcgcccgacagccttccagttcctgcaagaaatcaagccggaagccgtagcgtacatcaccattaagaccactctggcttgcctaaccagtgcggacaatacaaccgttcaggctgtagcaagcgcaatcggtaaagccattgaggacgaggctcgcttcggtcgtatccgtgaccttgaagctaagcacttcaagaagaacgttgaggaacaactcaacaagcgcgtagggcacgtctacaagaaagcatttatgcaagttgtcgagcacgacatgctctctaagggtctactcgggggcgtggtatggtcgtcgtggcataaggaagactctattcatgtaggagtacgctgcatcgagatgctcattgagtcaaccggaatggttagcttacaccgccaaaatgctggcgtagtaggtcaagactctgagcgtatcgaactcgcacctgaatacgctgaggctatcgcaacccgtgcaggtgcgctggctggcatctctccgatgttccaaccttgcgtagttcctcctaagccgtggactggcattactggtggtggctattgggctgcggggcgcaaacccctgcagttagtacgtactcgcagtctggcggcgcttcgccgctatgaagaagtgtcgatgccggaggtcatcaaagcagtcaacattgcgcagaatacagcatggcgtattaacaagaaagttctcgacgtagcgaataccatcacccaatggaaacactgtccagtcgcagatatccctgcgatggatcgtggcgaaatgccagctcgtccgttggacatcgataccaacgagattgcacttaaagcgtggaagaaagaagcttccgcgttctaccgcaaagacaaagcacgcgttagcttgcgtctgtcaatggagtttatgttatctcaggcgaacaagtttgcgaattatgaggcaatctggtttccgtggaacatggattggcgtgggcgcgtgtacgctgtcccgatgttcaatcctcagggcaacgatatgacgaaaggcctgctgacctttgcgcaggagaaacccattggtgaagacggcttctattggctcaagattcatggcgcaaatacagctggagtggataaagtaccgtttccacaacgcatcaaatttgttgaggataaccatacgaatattatggaatgcgcgaaagcaccgctggaaaacacttggtgggcggaacaggactcgccgttctgctttctggcgttctgctttgagtatgctggcgtcatcaatagtggtctgtcgtacaactgtagcttgcctctggcattcgatggtagttgctccggcctgcaacatttctcagcgatgttacgcgacgaaattggcggcaaagctgtgaatctcctcccatctgcggaataccaggatatttatcgtatcgtcagcgacaaagttaacgagatgctgaaacaagatctgattaacggtacctctaccaccgtggaaacggtgactgataagaagacaggcgaaattacccaacgcacgaaatacgggaccaaagttatggcacagtggtggttagaacacggtgtgaatcgtggcgtcacgaaacgctcggttatgactttggtgtatggggcgctggagtttggattccgcgatcaagtgctgagtgacaccattcaaaaagcgatcgataacggcaagggtgacatgtttctgaatccgaatcaggctgctggttacatggcgaaactgatctggaacgcagtgtccgggaccgtagtcgcagcagttgaggcgatgaactggctgaaaagtgcggcgaaattacttgctgctgaagtgaaggatcgtaagacggatacagttctgcgtggccgctgcgcagtacattgggtgactcccgacggcttccctgtgtggcaggaatacaagaagcctattcagacgcgcttgaacctgatgttcctcggtcagttccgcttacagcctaccattaacaccaacaaagatagcgagattgatgcgcgcaaacaggtgtctggtatcgctcctaactttgtacacagcctggacggtaaccaccttcgtatgactgtagtgtgggcacacgagaagtacggaatcgaatcttttgcactgattcacgactccttcggtaccattccggctgacgctgcgaacctgttcaaagcagtgcgcgaaactttcgttgacacatatgagtcttgtgatgtactggctgatttctacgaccagattgctgaccagttgcacgagtctcaacgcgacaaaatgccagcacttccggctaaaggtaacttgaacctccgtgacatcttaaaatcggacttcgcgttcgcg

SEQ ID NO: 2012 - protein, 890 aa, synthetic construct
  REGION 1..890: note = Variant of RNA polymerase
MHHHHHHMNTINIAKNDFSDIELAAIPFNTLADHYGERLAREQLALEHESYEMGEARFRKMFERQLKAGEVADNAAAKPLITTLLPKMIARINDWFEEVKAKRGKRPTAFQFLQEIKPEAVAYITIKTTLACLTSADNTTVQAVASAIGKAIEDEARFGRIRDLEAKHFKKNVEEQLNKRVGHVYKKAFMQVVEHDMLSKGLLGGVVWSSWHKEDSIHVGVRCIEMLIESTGMVSLHRQNAGVVGQDSERIELAPEYAEAIATRAGALAGISPMFQPCVVPPKPWTGITGGGYWAAGRKPLQLVRTRSLAALRRYEEVSMPEVIKAVNIAQNTAWRINKKVLDVANTITQWKHCPVADIPAMDRGEMPARPLDIDTNEIALKAWKKEASAFYRKDKARVSLRLSMEFMLSQANKFANYEAIWFPWNMDWRGRVYAVPMFNPQGNDMTKGLLTFAQEKPIGEDGFYWLKIHGANTAGVDKVPFPQRIKFVEDNHTNIMECAKAPLENTWWAEQDSPFCFLAFCFEYAGVINSGLSYNCSLPLAFDGSCSGLQHFSAMLRDEIGGKAVNLLPSAEYQDIYRIVSDKVNEMLKQDLINGTSTTVETVTDKKTGEITQRTKYGTKVMAQWWLEHGVNRGVTKRSVMTLVYGALEFGFRDQVLSDTIQKAIDNGKGDMFLNPNQAAGYMAKLIWNAVSGTVVAAVEAMNWLKSAAKLLAAEVKDRKTDTVLRGRCAVHWVTPDGFPVWQEYKKPIQTRLNLMFLGQFRLQPTINTNKDSEIDARKQVSGIAPNFVHSLDGNHLRMTVVWAHEKYGIESFALIHDSFGTIPADAANLFKAVRETFVDTYESCDVLADFYDQIADQLHESQRDKMPALPAKGNLNLRDILKSDFAFA

SEQ ID NO: 2013 - DNA, 2670 bp, synthetic construct
  misc_feature 1..2670: note = Variant of RNA polymerase
  source 1..2670: mol_type = other DNA
atgcaccatcaccatcaccatatgaacacgattaacattgctaagaacgacttctctgacatcgaactggctgctatcccgttcaacactctggctgaccattacggtgagcgtttagctcgcgaacagttggcccttgagcatgagtcttacgagatgggtgaagcacgcttccgcaagatgtttgagcgtcaacttaaagctggtgaggttgcggataacgctgccgccaagcctctcatcactaccctactccctaagatgattgcacgcatcaacgactggtttgaggaagtgaaagccaagcgcggcaagcgcccgacagccttccagttcctgcaagaaatcaagccggaagccgtagcgtacatcaccattaagaccactctggcttgcctaaccagtgcggacaatacaaccgttcaggctgtagcaagcgcaatcggtaaagccattgaggacgaggctcgcttcggtcgtatccgtgaccttgaagctaagcacttcaagaagaacgttgaggaacaactcaacaagcgcgtagggcacgtctacaagaaagcatttatgcaagttgtcgagcacgacatgctctctaagggtctactcgggggcgtggtatggtcgtcgtggcataaggaagactctattcatgtaggagtacgctgcatcgagatgctcattgagtcaaccggaatggttagcttacaccgccaaaatgctggcgtagtaggtcaagactctgagcgtatcgaactcgcacctgaatacgctgaggctatcgcaacccgtgcaggtgcgctggctggcatctctccgatgttccaaccttgcgtagttcctcctaagccgtggactggcattgtgggtggtggctattgggctgcggggcgcaaacccctgcagttagtacgtactcgcagtctggcggcgcttcgccgctatgaagaagtgtcgatgccggaggtcatcaaagcagtcaacattgcgcagaatacagcatggcgtattaacaagaaagttctcgacgtagcgaataccatcacccaatggaaacactgtccagtcgcagatatccctgcgatggatcgtggcgaaatgccagctcgtccgttggacatcgataccaacgagattgcacttaaagcgtggaagaaagaagcttccgcgttctaccgcaaagacaaagcacgcgttagccgtcgtctgtcaatggagtttatgttatctcaggcgaacaagtttgcgaattatgaggcaatctggtttccgtggaacatggattggcgtgggcgcgtgtacgctgtcccgatgttcaatcctcagggcaacgatatgacgaaaggcctgctgacctttgcgcaggagaaacccattggtgaagacggcttctattggctcaagattcatggcgcaaatacagctggagtggataaagtaccgtttccacaacgcatcaaatttgttgaggataaccatacgaatattatggaatgcgcgaaagcaccgctggaaaacacttggtgggcggaacaggactcgccgttctgctttctggcgttctgctttgagtatgctggcgtcatcaatagtggtctgtcgtacaactgtagcttgcctctggcattcgatggtagttgctccggcctgcaacatttctcagcgatgttacgcgacgaaattggcggcaaagctgtgaatctcctcccatctgcggaataccaggatatttatcgtatcgtcagcgacaaagttaacgagatgctgaaacaagatctgattaacggtacctctaccaccgtggaaacggtgactgataagaagacaggcgaaattacccaacgcacgaaatacgggaccaaagttatggcacagtggtggttagaacacggtgtgaatcgtggcgtcacgaaacgctcggttatgactttggtgtatggggcgctggagtttggattccgcgatcaagtgctgagtgacaccattcaaaaagcgatcgataacggcaagggtgacatgtttctgaatccgaatcaggctgctggttacatggcgaaactgatctggaacgcagtgtccgggaccgtagtcgcagcagttgaggcgatgaactggctgaaaagtgcggcgaaattacttgctgctgaagtgaaggatcgtaagacggatacagttctgcgtggccgctgcgcagtacattgggtgactcccgacggcttccctgtgtggcaggaatacaagaagcctattcagacgcgcttgaacctgatgttcctcggtcagttccgcttacagcctaccattaacaccaacaaagatagcgagattgatgcgcgcaaacaggtgtctggtatcgctcctaactttgtacacagcctggacggtaaccaccttcgtatgactgtagtgtgggcacacgagaagtacggaatcgaatcttttgcactgattcacgactccttcggtaccattccggctgacgctgcgaacctgttcaaagcagtgcgcgaaactttcgttgacacatatgagtcttgtgatgtactggctgatttctacgaccagattgctgaccagttgcacgagtctcaacgcgacaaaatgccagcacttccggctaaaggtaacttgaacctccgtgacatcttaaaatcggacttcgcgttcgcg

SEQ ID NO: 2014 - protein, 890 aa, synthetic construct
  REGION 1..890: note = Variant of RNA polymerase
MHHHHHHMNTINIAKNDFSDIELAAIPFNTLADHYGERLAREQLALEHESYEMGEARFRKMFERQLKAGEVADNAAAKPLITTLLPKMIARINDWFEEVKAKRGKRPTAFQFLQEIKPEAVAYITIKTTLACLTSADNTTVQAVASAIGKAIEDEARFGRIRDLEAKHFKKNVEEQLNKRVGHVYKKAFMQVVEHDMLSKGLLGGVVWSSWHKEDSIHVGVRCIEMLIESTGMVSLHRQNAGVVGQDSERIELAPEYAEAIATRAGALAGISPMFQPCVVPPKPWTGIVGGGYWAAGRKPLQLVRTRSLAALRRYEEVSMPEVIKAVNIAQNTAWRINKKVLDVANTITQWKHCPVADIPAMDRGEMPARPLDIDTNEIALKAWKKEASAFYRKDKARVSRRLSMEFMLSQANKFANYEAIWFPWNMDWRGRVYAVPMFNPQGNDMTKGLLTFAQEKPIGEDGFYWLKIHGANTAGVDKVPFPQRIKFVEDNHTNIMECAKAPLENTWWAEQDSPFCFLAFCFEYAGVINSGLSYNCSLPLAFDGSCSGLQHFSAMLRDEIGGKAVNLLPSAEYQDIYRIVSDKVNEMLKQDLINGTSTTVETVTDKKTGEITQRTKYGTKVMAQWWLEHGVNRGVTKRSVMTLVYGALEFGFRDQVLSDTIQKAIDNGKGDMFLNPNQAAGYMAKLIWNAVSGTVVAAVEAMNWLKSAAKLLAAEVKDRKTDTVLRGRCAVHWVTPDGFPVWQEYKKPIQTRLNLMFLGQFRLQPTINTNKDSEIDARKQVSGIAPNFVHSLDGNHLRMTVVWAHEKYGIESFALIHDSFGTIPADAANLFKAVRETFVDTYESCDVLADFYDQIADQLHESQRDKMPALPAKGNLNLRDILKSDFAFA

SEQ ID NO: 2015 - DNA, 2670 bp, synthetic construct
  misc_feature 1..2670: note = Variant of RNA polymerase
  source 1..2670: mol_type = other DNA
atgcaccatcaccatcaccatatgaacacgattaacattgctaagaacgacttctctgacatcgaactggctgctatcccgttcaacactctggctgaccattacggtgagcgtttagctcgcgaacagttggcccttgagcatgagtcttacgagatgggtgaagcacgcttccgcaagatgtttgagcgtcaacttaaagctggtgaggttgcggataacgctgccgccaagcctctcatcactaccctactccctaagatgattgcacgcatcaacgactggtttgaggaagtgaaagccaagcgcggcaagcgcccgacagccttccagttcctgcaagaaatcaagccggaagccgtagcgtacatcaccattaagaccactctggcttgcctaaccagtgcggacaatacaaccgttcaggctgtagcaagcgcaatcggtaaagccattgaggacgaggctcgcttcggtcgtatccgtgaccttgaagctaagcacttcaagaagaacgttgaggaacaactcaacaagcgcgtagggcacgtctacaagaaagcatttatgcaagttgtcgagcacgacatgctctctaagggtctactcgggggcgtggtatggtcgtcgtggcataaggaagactctattcatgtaggagtacgctgcatcgagatgctcattgagtcaaccggaatggttagcttacaccgccaaaatgctggcgtagtaggtcaagactctgagcgtatcgaactcgcacctgaatacgctgaggctatcgcaacccgtgcaggtgcgctggctggcatctctccgatgttccaaccttgcgtagttcctcctaagccgtggactggcattactggtggtggctattgggctgcggggcgcaaacccctgcagttagtacgtactcgcagtctggcggcgcttcgccgctatgaagaagtgtcgatgccggaggtcatcaaagcagtcaacattgcgcagaatacagcatggcgtattaacaagaaagttctcgacgtagcgaataccatcacccaatggaaacactgtccagtcgcagatatccctgcgatggatcgtggcgaaatgccagctcgtccgttggacatcgataccaacgagattgcacttaaagcgtggaagaaagaagcttccgcgttctaccgcaaagacaaagcacgcgttagccgtcgtctgtcaatggagtttatgttatctcaggcgaacaagtttgcgaattatgaggcaatctggtttccgtggaacatggattggcgtgggcgcgtgtacgctgtcccgatgttcaatcctcagggcaacgatatgacgaaaggcctgctgacctttgcgcaggagaaacccattggtgaagacggcttctattggctcaagattgggggcgcaaatacagctggagtggataaagtaccgtttccacaacgcatcaaatttgttgaggataaccatacgaatattatggaatgcgcgaaagcaccgctggaaaacacttggtgggcggaacaggactcgccgttctgctttctggcgttctgctttgagtatgctggcgtcatcaatagtggtctgtcgtacaactgtagcttgcctctggcattcgatggtagttgctccggcctgcaacatttctcagcgatgttacgcgacgaaattggcggcaaagctgtgaatctcctcccatctgcggaataccaggatatttatcgtatcgtcagcgacaaagttaacgagatgctgaaacaagatctgattaacggtacctctaccaccgtggaaacggtgactgataagaagacaggcgaaattacccaacgcacgaaatacgggaccaaagttatggcacagtggtggttagaacacggtgtgaatcgtggcgtcacgaaacgctcggttatgactttggtgtatggggcgctggagtttggattccgcgatcaagtgctgagtgacaccattcaaaaagcgatcgataacggcaagggtgacatgtttctgaatccgaatcaggctgctggttacatggcgaaactgatctggaacgcagtgtccgggaccgtagtcgcagcagttgaggcgatgaactggctgaaaagtgcggcgaaattacttgctgctgaagtgaaggatcgtaagacggatacagttctgcgtggccgctgcgcagtacattgggtgactcccgacggcttccctgtgtggcaggaatacaagaagcctattcagacgcgcttgaacctgatgttcctcggtcagttccgcttacagcctaccattaacaccaacaaagatagcgagattgatgcgcgcaaacaggtgtctggtatcgctcctaactttgtacacagcctggacggtaaccaccttcgtatgactgtagtgtgggcacacgagaagtacggaatcgaatcttttgcactgattcacgactccttcggtaccattccggctgacgctgcgaacctgttcaaagcagtgcgcgaaactttcgttgacacatatgagtcttgtgatgtactggctgatttctacgaccagattgctgaccagttgcacgagtctcaacgcgacaaaatgccagcacttccggctaaaggtaacttgaacctccgtgacatcttaaaatcggacttcgcgttcgcg

SEQ ID NO: 2016 - protein, 890 aa, synthetic construct
  REGION 1..890: note = Variant of RNA polymerase
MHHHHHHMNTINIAKNDFSDIELAAIPFNTLADHYGERLAREQLALEHESYEMGEARFRKMFERQLKAGEVADNAAAKPLITTLLPKMIARINDWFEEVKAKRGKRPTAFQFLQEIKPEAVAYITIKTTLACLTSADNTTVQAVASAIGKAIEDEARFGRIRDLEAKHFKKNVEEQLNKRVGHVYKKAFMQVVEHDMLSKGLLGGVVWSSWHKEDSIHVGVRCIEMLIESTGMVSLHRQNAGVVGQDSERIELAPEYAEAIATRAGALAGISPMFQPCVVPPKPWTGITGGGYWAAGRKPLQLVRTRSLAALRRYEEVSMPEVIKAVNIAQNTAWRINKKVLDVANTITQWKHCPVADIPAMDRGEMPARPLDIDTNEIALKAWKKEASAFYRKDKARVSRRLSMEFMLSQANKFANYEAIWFPWNMDWRGRVYAVPMFNPQGNDMTKGLLTFAQEKPIGEDGFYWLKIGGANTAGVDKVPFPQRIKFVEDNHTNIMECAKAPLENTWWAEQDSPFCFLAFCFEYAGVINSGLSYNCSLPLAFDGSCSGLQHFSAMLRDEIGGKAVNLLPSAEYQDIYRIVSDKVNEMLKQDLINGTSTTVETVTDKKTGEITQRTKYGTKVMAQWWLEHGVNRGVTKRSVMTLVYGALEFGFRDQVLSDTIQKAIDNGKGDMFLNPNQAAGYMAKLIWNAVSGTVVAAVEAMNWLKSAAKLLAAEVKDRKTDTVLRGRCAVHWVTPDGFPVWQEYKKPIQTRLNLMFLGQFRLQPTINTNKDSEIDARKQVSGIAPNFVHSLDGNHLRMTVVWAHEKYGIESFALIHDSFGTIPADAANLFKAVRETFVDTYESCDVLADFYDQIADQLHESQRDKMPALPAKGNLNLRDILKSDFAFA

SEQ ID NO: 2017 - DNA, 2670 bp, synthetic construct
  misc_feature 1..2670: note = Variant of RNA polymerase
  source 1..2670: mol_type = other DNA
atgcaccatcaccatcaccatatgaacacgattaacattgctaagaacgacttctctgacatcgaactggctgctatcccgttcaacactctggctgaccattacggtgagcgtttagctcgcgaacagttggcccttgagcatgagtcttacgagatgggtgaagcacgcttccgcaagatgtttgagcgtcaacttaaagctggtgaggttgcggataacgctgccgccaagcctctcatcactaccctactccctaagatgattgcacgcatcaacgactggtttgaggaagtgaaagccaagcgcggcaagcgcccgacagccttccagttcctgcaagaaatcaagccggaagccgtagcgtacatcaccattaagaccactctggcttgcctaaccagtgcggacaatacaaccgttcaggctgtagcaagcgcaatcggtaaagccattgaggacgaggctcgcttcggtcgtatccgtgaccttgaagctaagcacttcaagaagaacgttgaggaacaactcaacaagcgcgtagggcacgtctacaagaaagcatttatgcaagttgtcgagcacgacatgctctctaagggtctactcgggggcgtggtatggtcgtcgtggcataaggaagactctattcatgtaggagtacgctgcatcgagatgctcattgagtcaaccggaatggttagcttacaccgccaaaatgctggcgtagtaggtcaagactctgagcgtatcgaactcgcacctgaatacgctgaggctatcgcaacccgtgcaggtgcgctggctggcatctctccgatgttccaaccttgcgtagttcctcctaagccgtggactggcattactggtggtggctattgggctgcggggcgcaaacccctgcagttagtacgtactcgcagtctggcggcgcttcgccgctatgaagaagtgtcgatgccggaggtcatcaaagcagtcaacattgcgcagaatacagcatggcgtattaacaagaaagttctcgacgtagcgaataccatcacccaatggaaacactgtccagtcgcagatatccctgcgatggatcgtggcgaaatgccagctcgtccgttggacatcgataccaacgagattgcacttaaagcgtggaagaaagaagcttccgcgttctaccgcaaagacaaagcacgcgttagccgtcgtctgtcaatggagtttatgttatctcaggcgaacaagtttgcgaattatgaggcaatctggtttccgtggaacatggattggcgtgggcgcgtgtacgctgtcccgatgttcaatcctcagggcaacgatatgacgaaaggcgttctgacctttgcgcaggagaaacccattggtgaagacggcttctattggctcaagattcatggcgcaaatacagctggagtggataaagtaccgtttccacaacgcatcaaatttgttgaggataaccatacgaatattatggaatgcgcgaaagcaccgctggaaaacacttggtgggcggaacaggactcgccgttctgctttctggcgttctgctttgagtatgctggcgtcatcaatagtggtctgtcgtacaactgtagcttgcctctggcattcgatggtagttgctccggcctgcaacatttctcagcgatgttacgcgacgaaattggcggcaaagctgtgaatctcctcccatctgcggaataccaggatatttatcgtatcgtcagcgacaaagttaacgagatgctgaaacaagatctgattaacggtacctctaccaccgtggaaacggtgactgataagaagacaggcgaaattacccaacgcacgaaatacgggaccaaagttatggcacagtggtggttagaacacggtgtgaatcgtggcgtcacgaaacgctcggttatgactttggtgtatggggcgctggagtttggattccgcgatcaagtgctgagtgacaccattcaaaaagcgatcgataacggcaagggtgacatgtttctgaatccgaatcaggctgctggttacatggcgaaactgatctggaacgcagtgtccgggaccgtagtcgcagcagttgaggcgatgaactggctgaaaagtgcggcgaaattacttgctgctgaagtgaaggatcgtaagacggatacagttctgcgtggccgctgcgcagtacattgggtgactcccgacggcttccctgtgtggcaggaatacaagaagcctattcagacgcgcttgaacctgatgttcctcggtcagttccgcttacagcctaccattaacaccaacaaagatagcgagattgatgcgcgcaaacaggtgtctggtatcgctcctaactttgtacacagcctggacggtaaccaccttcgtatgactgtagtgtgggcacacgagaagtacggaatcgaatcttttgcactgattcacgactccttcggtaccattccggctgacgctgcgaacctgttcaaagcagtgcgcgaaactttcgttgacacatatgagtcttgtgatgtactggctgatttctacgaccagattgctgaccagttgcacgagtctcaacgcgacaaaatgccagcacttccggctaaaggtaacttgaacctccgtgacatcttaaaatcggacttcgcgttcgcg

SEQ ID NO: 2018 - protein, 890 aa, synthetic construct
  REGION 1..890: note = Variant of RNA polymerase
MHHHHHHMNTINIAKNDFSDIELAAIPFNTLADHYGERLAREQLALEHESYEMGEARFRKMFERQLKAGEVADNAAAKPLITTLLPKMIARINDWFEEVKAKRGKRPTAFQFLQEIKPEAVAYITIKTTLACLTSADNTTVQAVASAIGKAIEDEARFGRIRDLEAKHFKKNVEEQLNKRVGHVYKKAFMQVVEHDMLSKGLLGGVVWSSWHKEDSIHVGVRCIEMLIESTGMVSLHRQNAGVVGQDSERIELAPEYAEAIATRAGALAGISPMFQPCVVPPKPWTGITGGGYWAAGRKPLQLVRTRSLAALRRYEEVSMPEVIKAVNIAQNTAWRINKKVLDVANTITQWKHCPVADIPAMDRGEMPARPLDIDTNEIALKAWKKEASAFYRKDKARVSRRLSMEFMLSQANKFANYEAIWFPWNMDWRGRVYAVPMFNPQGNDMTKGVLTFAQEKPIGEDGFYWLKIHGANTAGVDKVPFPQRIKFVEDNHTNIMECAKAPLENTWWAEQDSPFCFLAFCFEYAGVINSGLSYNCSLPLAFDGSCSGLQHFSAMLRDEIGGKAVNLLPSAEYQDIYRIVSDKVNEMLKQDLINGTSTTVETVTDKKTGEITQRTKYGTKVMAQWWLEHGVNRGVTKRSVMTLVYGALEFGFRDQVLSDTIQKAIDNGKGDMFLNPNQAAGYMAKLIWNAVSGTVVAAVEAMNWLKSAAKLLAAEVKDRKTDTVLRGRCAVHWVTPDGFPVWQEYKKPIQTRLNLMFLGQFRLQPTINTNKDSEIDARKQVSGIAPNFVHSLDGNHLRMTVVWAHEKYGIESFALIHDSFGTIPADAANLFKAVRETFVDTYESCDVLADFYDQIADQLHESQRDKMPALPAKGNLNLRDILKSDFAFA

SEQ ID NO: 2019 - DNA, 33 bp, synthetic construct
  misc_feature 1..33: note = Modified oligo substrate or product
  source 1..33: mol_type = other DNA
ctaatacgactcactataggcacccaggcaagt

SEQ ID NO: 2020 - DNA, 33 bp, synthetic construct
  misc_feature 1..33: note = Modified oligo substrate or product
  modified_base 1: mod_base = OTHER; note = n is a 2'-O-methyladenosine
  modified_base 2: mod_base = OTHER; note = n is a 2'-O-methylcytidine
  source 1..33: mol_type = other DNA
nnttgcctgggtgcctatagtgagtcgtattag

SEQ ID NO: 2021 - RNA, 15 nt, synthetic construct
  misc_feature 1..15: note = Modified oligo substrate or product
  modified_base 1: mod_base = OTHER; note = n is a 5'-triphosphorylated guanosine
  source 1..15: mol_type = other RNA
ngcacccaggcaagt

SEQ ID NO: 2022 - RNA, 15 nt, synthetic construct
  misc_feature 1..15: note = Modified oligo substrate or product
  modified_base 1: mod_base = OTHER; note = n is an anti-reverse cap analog
  source 1..15: mol_type = other RNA
ngcacccaggcaagt

SEQ ID NO: 2023 - RNA, 15 nt, synthetic construct
  misc_feature 1..15: note = Modified oligo substrate or product
  modified_base 1: mod_base = OTHER; note = n is a 5'-triphosphorylated guanosine
  modified_base 15: mod_base = OTHER; note = n is an Alexa488-labeled uridine
  source 1..15: mol_type = other RNA
ngcacccaggcaagn

SEQ ID NO: 2024 - RNA, 15 nt, synthetic construct
  misc_feature 1..15: note = Modified oligo substrate or product
  modified_base 1: mod_base = OTHER; note = n is an anti-reverse cap analog
  modified_base 15: mod_base = OTHER; note = n is an Alexa488-labeled uridine
  source 1..15: mol_type = other RNA
ngcacccaggcaagn

SEQ ID NO: 2025 - DNA, 33 bp, synthetic construct
  misc_feature 1..33: note = Modified oligo substrate or product
  source 1..33: mol_type = other DNA
ctaatacgactcactataaggccccaggacgat

SEQ ID NO: 2026 - DNA, 33 bp, synthetic construct
  misc_feature 1..33: note = Modified oligo substrate or product
  modified_base 1: mod_base = OTHER; note = n is a 2'-O-methyladenosine
  modified_base 2: mod_base = OTHER; note = n is a 2'-O-methyluridine
  source 1..33: mol_type = other DNA
nncgtcctggggccttatagtgagtcgtattag

SEQ ID NO: 2027 - RNA, 15 nt, synthetic construct
  misc_feature 1..15: note = Modified oligo substrate or product
  modified_base 1: mod_base = OTHER; note = n is a 5'-triphosphorylated adenosine
  source 1..15: mol_type = other RNA
nggccccaggacgat

SEQ ID NO: 2028 - RNA, 14 nt, synthetic construct
  misc_feature 1..14: note = Modified oligo substrate or product
  modified_base 1: mod_base = OTHER; note = n is a CleanCap-AG cap analog
  source 1..14: mol_type = other RNA
ngccccaggacgat

SEQ ID NO: 2029 - RNA, 15 nt, synthetic construct
  misc_feature 1..15: note = Modified oligo substrate or product
  modified_base 1: mod_base = OTHER; note = n is a 5'-triphosphorylated adenosine
  modified_base 15: mod_base = OTHER; note = n is an Alexa488-labeled uridine
  source 1..15: mol_type = other RNA
nggccccaggacgan

SEQ ID NO: 2030 - RNA, 14 nt, synthetic construct
  misc_feature 1..14: note = Modified oligo substrate or product
  modified_base 1: mod_base = OTHER; note = n is a CleanCap-AG cap analog
  modified_base 14: mod_base = OTHER; note = n is an Alexa488-labeled uridine
  source 1..14: mol_type = other RNA
ngccccaggacgan
